United States Patent Application Publication US 2026/0275333 A1, published September 17, 2026 (application 18/715,684).

The application's sequence listing, which the Patent Office published only in electronic form, follows.

SEQUENCE LISTING (10828 sequences)

SEQ ID NO: 1 - DNA, 25 bp, synthetic construct
  source 1..25: mol_type = other DNA
ggagggatacctgtatattacaagt

SEQ ID NO: 2 - DNA, 25 bp, synthetic construct
  source 1..25: mol_type = other DNA
aggagggatacctgtatattacaag

SEQ ID NO: 3 - DNA, 25 bp, synthetic construct
  source 1..25: mol_type = other DNA
caggagggatacctgtatattacaa

SEQ ID NO: 4 - DNA, 25 bp, synthetic construct
  source 1..25: mol_type = other DNA
ccaggagggatacctgtatattaca

SEQ ID NO: 5 - DNA, 25 bp, synthetic construct
  source 1..25: mol_type = other DNA
accaggagggatacctgtatattac

SEQ ID NO: 6 - DNA, 25 bp, synthetic construct
  source 1..25: mol_type = other DNA
taccaggagggatacctgtatatta

SEQ ID NO: 7 - DNA, 25 bp, synthetic construct
  source 1..25: mol_type = other DNA
ttaccaggagggatacctgtatatt

SEQ ID NO: 8 - DNA, 25 bp, synthetic construct
  source 1..25: mol_type = other DNA
cttaccaggagggatacctgtatat

SEQ ID NO: 9 - DNA, 25 bp, synthetic construct
  source 1..25: mol_type = other DNA
gcttaccaggagggatacctgtata

SEQ ID NO: 10 - DNA, 25 bp, synthetic construct
  source 1..25: mol_type = other DNA
agcttaccaggagggatacctgtat

SEQ ID NO: 11 - DNA, 25 bp, synthetic construct
  source 1..25: mol_type = other DNA
gagcttaccaggagggatacctgta

SEQ ID NO: 12 - DNA, 25 bp, synthetic construct
  source 1..25: mol_type = other DNA
agagcttaccaggagggatacctgt

SEQ ID NO: 13 - DNA, 25 bp, synthetic construct
  source 1..25: mol_type = other DNA
cagagcttaccaggagggatacctg

SEQ ID NO: 14 - DNA, 25 bp, synthetic construct
  source 1..25: mol_type = other DNA
ccagagcttaccaggagggatacct

SEQ ID NO: 15 - DNA, 25 bp, synthetic construct
  source 1..25: mol_type = other DNA
accagagcttaccaggagggatacc

SEQ ID NO: 16 - DNA, 25 bp, synthetic construct
  source 1..25: mol_type = other DNA
taccagagcttaccaggagggatac

SEQ ID NO: 17 - DNA, 25 bp, synthetic construct
  source 1..25: mol_type = other DNA
ataccagagcttaccaggagggata

SEQ ID NO: 18 - DNA, 25 bp, synthetic construct
  source 1..25: mol_type = other DNA
aataccagagcttaccaggagggat

SEQ ID NO: 19 - DNA, 25 bp, synthetic construct
  source 1..25: mol_type = other DNA
taataccagagcttaccaggaggga

SEQ ID NO: 20 - DNA, 25 bp, synthetic construct
  source 1..25: mol_type = other DNA
ataataccagagcttaccaggaggg

SEQ ID NO: 21 - DNA, 25 bp, synthetic construct
  source 1..25: mol_type = other DNA
cataataccagagcttaccaggagg

SEQ ID NO: 22 - DNA, 25 bp, synthetic construct
  source 1..25: mol_type = other DNA
acataataccagagcttaccaggag

SEQ ID NO: 23 - DNA, 25 bp, synthetic construct
  source 1..25: mol_type = other DNA
gacataataccagagcttaccagga

SEQ ID NO: 24 - DNA, 25 bp, synthetic construct
  source 1..25: mol_type = other DNA
agacataataccagagcttaccagg

SEQ ID NO: 25 - DNA, 25 bp, synthetic construct
  source 1..25: mol_type = other DNA
aagacataataccagagcttaccag

SEQ ID NO: 26 - DNA, 25 bp, synthetic construct
  source 1..25: mol_type = other DNA
taagacataataccagagcttacca

SEQ ID NO: 27 - DNA, 25 bp, synthetic construct
  source 1..25: mol_type = other DNA
ttaagacataataccagagcttacc

SEQ ID NO: 28 - DNA, 25 bp, synthetic construct
  source 1..25: mol_type = other DNA
gttaagacataataccagagcttac

SEQ ID NO: 29 - DNA, 25 bp, synthetic construct
  source 1..25: mol_type = other DNA
tgttaagacataataccagagctta

SEQ ID NO: 30 - DNA, 25 bp, synthetic construct
  source 1..25: mol_type = other DNA
atgttaagacataataccagagctt

SEQ ID NO: 31 - DNA, 25 bp, synthetic construct
  source 1..25: mol_type = other DNA
aatgttaagacataataccagagct

SEQ ID NO: 32 - DNA, 25 bp, synthetic construct
  source 1..25: mol_type = other DNA
aaatgttaagacataataccagagc

SEQ ID NO: 33 - DNA, 25 bp, synthetic construct
  source 1..25: mol_type = other DNA
aaaatgttaagacataataccagag

SEQ ID NO: 34 - DNA, 25 bp, synthetic construct
  source 1..25: mol_type = other DNA
aaaaatgttaagacataataccaga

SEQ ID NO: 35 - DNA, 25 bp, synthetic construct
  source 1..25: mol_type = other DNA
taaaaatgttaagacataataccag

SEQ ID NO: 36 - DNA, 25 bp, synthetic construct
  source 1..25: mol_type = other DNA
ttaaaaatgttaagacataatacca

SEQ ID NO: 37 - DNA, 25 bp, synthetic construct
  source 1..25: mol_type = other DNA
tttaaaaatgttaagacataatacc

SEQ ID NO: 38 - DNA, 25 bp, synthetic construct
  source 1..25: mol_type = other DNA
atttaaaaatgttaagacataatac

SEQ ID NO: 39 - DNA, 25 bp, synthetic construct
  source 1..25: mol_type = other DNA
gatttaaaaatgttaagacataata

SEQ ID NO: 40 - DNA, 25 bp, synthetic construct
  source 1..25: mol_type = other DNA
agatttaaaaatgttaagacataat

SEQ ID NO: 41 - DNA, 25 bp, synthetic construct
  source 1..25: mol_type = other DNA
tagatttaaaaatgttaagacataa

SEQ ID NO: 42 - DNA, 25 bp, synthetic construct
  source 1..25: mol_type = other DNA
atagatttaaaaatgttaagacata

SEQ ID NO: 43 - DNA, 25 bp, synthetic construct
  source 1..25: mol_type = other DNA
catagatttaaaaatgttaagacat

SEQ ID NO: 44 - DNA, 25 bp, synthetic construct
  source 1..25: mol_type = other DNA
ccatagatttaaaaatgttaagaca

SEQ ID NO: 45 - DNA, 25 bp, synthetic construct
  source 1..25: mol_type = other DNA
accatagatttaaaaatgttaagac

SEQ ID NO: 46 - DNA, 25 bp, synthetic construct
  source 1..25: mol_type = other DNA
taccatagatttaaaaatgttaaga

SEQ ID NO: 47 - DNA, 25 bp, synthetic construct
  source 1..25: mol_type = other DNA
ttaccatagatttaaaaatgttaag

SEQ ID NO: 48 - DNA, 25 bp, synthetic construct
  source 1..25: mol_type = other DNA
attaccatagatttaaaaatgttaa

SEQ ID NO: 49 - DNA, 25 bp, synthetic construct
  source 1..25: mol_type = other DNA
gattaccatagatttaaaaatgtta

SEQ ID NO: 50 - DNA, 25 bp, synthetic construct
  source 1..25: mol_type = other DNA
agattaccatagatttaaaaatgtt

SEQ ID NO: 51 - DNA, 25 bp, synthetic construct
  source 1..25: mol_type = other DNA
aagattaccatagatttaaaaatgt

SEQ ID NO: 52 - DNA, 25 bp, synthetic construct
  source 1..25: mol_type = other DNA
aaagattaccatagatttaaaaatg

SEQ ID NO: 53 - DNA, 25 bp, synthetic construct
  source 1..25: mol_type = other DNA
taaagattaccatagatttaaaaat

SEQ ID NO: 54 - DNA, 25 bp, synthetic construct
  source 1..25: mol_type = other DNA
gtaaagattaccatagatttaaaaa

SEQ ID NO: 55 - DNA, 25 bp, synthetic construct
  source 1..25: mol_type = other DNA
tgtaaagattaccatagatttaaaa

SEQ ID NO: 56 - DNA, 25 bp, synthetic construct
  source 1..25: mol_type = other DNA
ttgtaaagattaccatagatttaaa

SEQ ID NO: 57 - DNA, 25 bp, synthetic construct
  source 1..25: mol_type = other DNA
tttgtaaagattaccatagatttaa

SEQ ID NO: 58 - DNA, 25 bp, synthetic construct
  source 1..25: mol_type = other DNA
ttttgtaaagattaccatagattta

SEQ ID NO: 59 - DNA, 25 bp, synthetic construct
  source 1..25: mol_type = other DNA
attttgtaaagattaccatagattt

SEQ ID NO: 60 - DNA, 25 bp, synthetic construct
  source 1..25: mol_type = other DNA
tattttgtaaagattaccatagatt

SEQ ID NO: 61 - DNA, 25 bp, synthetic construct
  source 1..25: mol_type = other DNA
atattttgtaaagattaccatagat

SEQ ID NO: 62 - DNA, 25 bp, synthetic construct
  source 1..25: mol_type = other DNA
aatattttgtaaagattaccataga

SEQ ID NO: 63 - DNA, 25 bp, synthetic construct
  source 1..25: mol_type = other DNA
aaatattttgtaaagattaccatag

SEQ ID NO: 64 - DNA, 25 bp, synthetic construct
  source 1..25: mol_type = other DNA
aaaatattttgtaaagattaccata

SEQ ID NO: 65 - DNA, 25 bp, synthetic construct
  source 1..25: mol_type = other DNA
taaaatattttgtaaagattaccat

SEQ ID NO: 66 - DNA, 25 bp, synthetic construct
  source 1..25: mol_type = other DNA
gtaaaatattttgtaaagattacca

SEQ ID NO: 67 - DNA, 25 bp, synthetic construct
  source 1..25: mol_type = other DNA
agtaaaatattttgtaaagattacc

SEQ ID NO: 68 - DNA, 25 bp, synthetic construct
  source 1..25: mol_type = other DNA
aagtaaaatattttgtaaagattac

SEQ ID NO: 69 - DNA, 25 bp, synthetic construct
  source 1..25: mol_type = other DNA
gaagtaaaatattttgtaaagatta

SEQ ID NO: 70 - DNA, 25 bp, synthetic construct
  source 1..25: mol_type = other DNA
ggaagtaaaatattttgtaaagatt

SEQ ID NO: 71 - DNA, 25 bp, synthetic construct
  source 1..25: mol_type = other DNA
cggaagtaaaatattttgtaaagat

SEQ ID NO: 72 - DNA, 25 bp, synthetic construct
  source 1..25: mol_type = other DNA
tcggaagtaaaatattttgtaaaga

SEQ ID NO: 73 - DNA, 25 bp, synthetic construct
  source 1..25: mol_type = other DNA
ttcggaagtaaaatattttgtaaag

SEQ ID NO: 74 - DNA, 25 bp, synthetic construct
  source 1..25: mol_type = other DNA
gttcggaagtaaaatattttgtaaa

SEQ ID NO: 75 - DNA, 25 bp, synthetic construct
  source 1..25: mol_type = other DNA
agttcggaagtaaaatattttgtaa

SEQ ID NO: 76 - DNA, 25 bp, synthetic construct
  source 1..25: mol_type = other DNA
gagttcggaagtaaaatattttgta

SEQ ID NO: 77 - DNA, 25 bp, synthetic construct
  source 1..25: mol_type = other DNA
tgagttcggaagtaaaatattttgt

SEQ ID NO: 78 - DNA, 25 bp, synthetic construct
  source 1..25: mol_type = other DNA
atgagttcggaagtaaaatattttg

SEQ ID NO: 79 - DNA, 25 bp, synthetic construct
  source 1..25: mol_type = other DNA
tatgagttcggaagtaaaatatttt

SEQ ID NO: 80 - DNA, 25 bp, synthetic construct
  source 1..25: mol_type = other DNA
atatgagttcggaagtaaaatattt

SEQ ID NO: 81 - DNA, 25 bp, synthetic construct
  source 1..25: mol_type = other DNA
tatatgagttcggaagtaaaatatt

SEQ ID NO: 82 - DNA, 25 bp, synthetic construct
  source 1..25: mol_type = other DNA
gtatatgagttcggaagtaaaatat

SEQ ID NO: 83 - DNA, 25 bp, synthetic construct
  source 1..25: mol_type = other DNA
ggtatatgagttcggaagtaaaata

SEQ ID NO: 84 - DNA, 25 bp, synthetic construct
  source 1..25: mol_type = other DNA
aggtatatgagttcggaagtaaaat

SEQ ID NO: 85 - DNA, 25 bp, synthetic construct
  source 1..25: mol_type = other DNA
caggtatatgagttcggaagtaaaa

SEQ ID NO: 86 - DNA, 25 bp, synthetic construct
  source 1..25: mol_type = other DNA
ccaggtatatgagttcggaagtaaa

SEQ ID NO: 87 - DNA, 25 bp, synthetic construct
  source 1..25: mol_type = other DNA
cccaggtatatgagttcggaagtaa

SEQ ID NO: 88 - DNA, 25 bp, synthetic construct
  source 1..25: mol_type = other DNA
ccccaggtatatgagttcggaagta

SEQ ID NO: 89 - DNA, 25 bp, synthetic construct
  source 1..25: mol_type = other DNA
tccccaggtatatgagttcggaagt

SEQ ID NO: 90 - DNA, 25 bp, synthetic construct
  source 1..25: mol_type = other DNA
atccccaggtatatgagttcggaag

SEQ ID NO: 91 - DNA, 25 bp, synthetic construct
  source 1..25: mol_type = other DNA
aatccccaggtatatgagttcggaa

SEQ ID NO: 92 - DNA, 25 bp, synthetic construct
  source 1..25: mol_type = other DNA
aaatccccaggtatatgagttcgga

SEQ ID NO: 93 - DNA, 25 bp, synthetic construct
  source 1..25: mol_type = other DNA
aaaatccccaggtatatgagttcgg

SEQ ID NO: 94 - DNA, 25 bp, synthetic construct
  source 1..25: mol_type = other DNA
taaaatccccaggtatatgagttcg

SEQ ID NO: 95 - DNA, 25 bp, synthetic construct
  source 1..25: mol_type = other DNA
ataaaatccccaggtatatgagttc

SEQ ID NO: 96 - DNA, 25 bp, synthetic construct
  source 1..25: mol_type = other DNA
aataaaatccccaggtatatgagtt

SEQ ID NO: 97 - DNA, 25 bp, synthetic construct
  source 1..25: mol_type = other DNA
taataaaatccccaggtatatgagt

SEQ ID NO: 98 - DNA, 25 bp, synthetic construct
  source 1..25: mol_type = other DNA
gtaataaaatccccaggtatatgag

SEQ ID NO: 99 - DNA, 25 bp, synthetic construct
  source 1..25: mol_type = other DNA
agtaataaaatccccaggtatatga

SEQ ID NO: 100 - DNA, 25 bp, synthetic construct
  source 1..25: mol_type = other DNA
gagtaataaaatccccaggtatatg

SEQ ID NO: 101 - DNA, 25 bp, synthetic construct
  source 1..25: mol_type = other DNA
agagtaataaaatccccaggtatat

SEQ ID NO: 102 - DNA, 25 bp, synthetic construct
  source 1..25: mol_type = other DNA
cagagtaataaaatccccaggtata

SEQ ID NO: 103 - DNA, 25 bp, synthetic construct
  source 1..25: mol_type = other DNA
ccagagtaataaaatccccaggtat

SEQ ID NO: 104 - DNA, 25 bp, synthetic construct
  source 1..25: mol_type = other DNA
cccagagtaataaaatccccaggta

SEQ ID NO: 105 - DNA, 25 bp, synthetic construct
  source 1..25: mol_type = other DNA
tcccagagtaataaaatccccaggt

SEQ ID NO: 106 - DNA, 25 bp, synthetic construct
  source 1..25: mol_type = other DNA
ttcccagagtaataaaatccccagg

SEQ ID NO: 107 - DNA, 25 bp, synthetic construct
  source 1..25: mol_type = other DNA
attcccagagtaataaaatccccag

SEQ ID NO: 108 - DNA, 25 bp, synthetic construct
  source 1..25: mol_type = other DNA
aattcccagagtaataaaatcccca

SEQ ID NO: 109 - DNA, 25 bp, synthetic construct
  source 1..25: mol_type = other DNA
taattcccagagtaataaaatcccc

SEQ ID NO: 110 - DNA, 25 bp, synthetic construct
  source 1..25: mol_type = other DNA
ataattcccagagtaataaaatccc

SEQ ID NO: 111 - DNA, 25 bp, synthetic construct
  source 1..25: mol_type = other DNA
cataattcccagagtaataaaatcc

SEQ ID NO: 112 - DNA, 25 bp, synthetic construct
  source 1..25: mol_type = other DNA
acataattcccagagtaataaaatc

SEQ ID NO: 113 - DNA, 25 bp, synthetic construct
  source 1..25: mol_type = other DNA
cacataattcccagagtaataaaat

SEQ ID NO: 114 - DNA, 25 bp, synthetic construct
  source 1..25: mol_type = other DNA
acacataattcccagagtaataaaa

SEQ ID NO: 115 - DNA, 25 bp, synthetic construct
  source 1..25: mol_type = other DNA
aacacataattcccagagtaataaa

SEQ ID NO: 116 - DNA, 25 bp, synthetic construct
  source 1..25: mol_type = other DNA
gaacacataattcccagagtaataa

SEQ ID NO: 117 - DNA, 25 bp, synthetic construct
  source 1..25: mol_type = other DNA
agaacacataattcccagagtaata

SEQ ID NO: 118 - DNA, 25 bp, synthetic construct
  source 1..25: mol_type = other DNA
cagaacacataattcccagagtaat

SEQ ID NO: 119 - DNA, 25 bp, synthetic construct
  source 1..25: mol_type = other DNA
gcagaacacataattcccagagtaa

SEQ ID NO: 120 - DNA, 25 bp, synthetic construct
  source 1..25: mol_type = other DNA
ggcagaacacataattcccagagta

SEQ ID NO: 121 - DNA, 25 bp, synthetic construct
  source 1..25: mol_type = other DNA
gggcagaacacataattcccagagt

SEQ ID NO: 122 - DNA, 25 bp, synthetic construct
  source 1..25: mol_type = other DNA
ggggcagaacacataattcccagag

SEQ ID NO: 123 - DNA, 25 bp, synthetic construct
  source 1..25: mol_type = other DNA
tggggcagaacacataattcccaga

SEQ ID NO: 124 - DNA, 25 bp, synthetic construct
  source 1..25: mol_type = other DNA
atggggcagaacacataattcccag

SEQ ID NO: 125 - DNA, 25 bp, synthetic construct
  source 1..25: mol_type = other DNA
gatggggcagaacacataattccca

SEQ ID NO: 126 - DNA, 25 bp, synthetic construct
  source 1..25: mol_type = other DNA
tgatggggcagaacacataattccc

SEQ ID NO: 127 - DNA, 25 bp, synthetic construct
  source 1..25: mol_type = other DNA
gtgatggggcagaacacataattcc

SEQ ID NO: 128 - DNA, 25 bp, synthetic construct
  source 1..25: mol_type = other DNA
agtgatggggcagaacacataattc

SEQ ID NO: 129 - DNA, 25 bp, synthetic construct
  source 1..25: mol_type = other DNA
gagtgatggggcagaacacataatt

SEQ ID NO: 130 - DNA, 25 bp, synthetic construct
  source 1..25: mol_type = other DNA
agagtgatggggcagaacacataat

SEQ ID NO: 131 - DNA, 25 bp, synthetic construct
  source 1..25: mol_type = other DNA
gagagtgatggggcagaacacataa

SEQ ID NO: 132 - DNA, 25 bp, synthetic construct
  source 1..25: mol_type = other DNA
agagagtgatggggcagaacacata

SEQ ID NO: 133 - DNA, 25 bp, synthetic construct
  source 1..25: mol_type = other DNA
gagagagtgatggggcagaacacat

SEQ ID NO: 134 - DNA, 25 bp, synthetic construct
  source 1..25: mol_type = other DNA
agagagagtgatggggcagaacaca

SEQ ID NO: 135 - DNA, 25 bp, synthetic construct
  source 1..25: mol_type = other DNA
aagagagagtgatggggcagaacac

SEQ ID NO: 136 - DNA, 25 bp, synthetic construct
  source 1..25: mol_type = other DNA
taagagagagtgatggggcagaaca

SEQ ID NO: 137 - DNA, 25 bp, synthetic construct
  source 1..25: mol_type = other DNA
ttaagagagagtgatggggcagaac

SEQ ID NO: 138 - DNA, 25 bp, synthetic construct
  source 1..25: mol_type = other DNA
attaagagagagtgatggggcagaa

SEQ ID NO: 139 - DNA, 25 bp, synthetic construct
  source 1..25: mol_type = other DNA
aattaagagagagtgatggggcaga

SEQ ID NO: 140 - DNA, 25 bp, synthetic construct
  source 1..25: mol_type = other DNA
caattaagagagagtgatggggcag

SEQ ID NO: 141 - DNA, 25 bp, synthetic construct
  source 1..25: mol_type = other DNA
ccaattaagagagagtgatggggca

SEQ ID NO: 142 - DNA, 25 bp, synthetic construct
  source 1..25: mol_type = other DNA
tccaattaagagagagtgatggggc

SEQ ID NO: 143 - DNA, 25 bp, synthetic construct
  source 1..25: mol_type = other DNA
atccaattaagagagagtgatgggg

SEQ ID NO: 144 - DNA, 25 bp, synthetic construct
  source 1..25: mol_type = other DNA
aatccaattaagagagagtgatggg

SEQ ID NO: 145 - DNA, 25 bp, synthetic construct
  source 1..25: mol_type = other DNA
aaatccaattaagagagagtgatgg

SEQ ID NO: 146 - DNA, 25 bp, synthetic construct
  source 1..25: mol_type = other DNA
aaaatccaattaagagagagtgatg

SEQ ID NO: 147 - DNA, 25 bp, synthetic construct
  source 1..25: mol_type = other DNA
aaaaatccaattaagagagagtgat

SEQ ID NO: 148 - DNA, 25 bp, synthetic construct
  source 1..25: mol_type = other DNA
taaaaatccaattaagagagagtga

SEQ ID NO: 149 - DNA, 25 bp, synthetic construct
  source 1..25: mol_type = other DNA
ttaaaaatccaattaagagagagtg

SEQ ID NO: 150 - DNA, 25 bp, synthetic construct
  source 1..25: mol_type = other DNA
tttaaaaatccaattaagagagagt

SEQ ID NO: 151 - DNA, 25 bp, synthetic construct
  source 1..25: mol_type = other DNA
ttttaaaaatccaattaagagagag

SEQ ID NO: 152 - DNA, 25 bp, synthetic construct
  source 1..25: mol_type = other DNA
attttaaaaatccaattaagagaga

SEQ ID NO: 153 - DNA, 25 bp, synthetic construct
  source 1..25: mol_type = other DNA
aattttaaaaatccaattaagagag

SEQ ID NO: 154 - DNA, 25 bp, synthetic construct
  source 1..25: mol_type = other DNA
taattttaaaaatccaattaagaga

SEQ ID NO: 155 - DNA, 25 bp, synthetic construct
  source 1..25: mol_type = other DNA
ataattttaaaaatccaattaagag

SEQ ID NO: 156 - DNA, 25 bp, synthetic construct
  source 1..25: mol_type = other DNA
tataattttaaaaatccaattaaga

SEQ ID NO: 157 - DNA, 25 bp, synthetic construct
  source 1..25: mol_type = other DNA
atataattttaaaaatccaattaag

SEQ ID NO: 158 - DNA, 25 bp, synthetic construct
  source 1..25: mol_type = other DNA
aatataattttaaaaatccaattaa

SEQ ID NO: 159 - DNA, 25 bp, synthetic construct
  source 1..25: mol_type = other DNA
gaatataattttaaaaatccaatta

SEQ ID NO: 160 - DNA, 25 bp, synthetic construct
  source 1..25: mol_type = other DNA
tgaatataattttaaaaatccaatt

SEQ ID NO: 161 - DNA, 25 bp, synthetic construct
  source 1..25: mol_type = other DNA
atgaatataattttaaaaatccaat

SEQ ID NO: 162 - DNA, 25 bp, synthetic construct
  source 1..25: mol_type = other DNA
tatgaatataattttaaaaatccaa

SEQ ID NO: 163 - DNA, 25 bp, synthetic construct
  source 1..25: mol_type = other DNA
atatgaatataattttaaaaatcca

SEQ ID NO: 164 - DNA, 25 bp, synthetic construct
  source 1..25: mol_type = other DNA
aatatgaatataattttaaaaatcc

SEQ ID NO: 165 - DNA, 25 bp, synthetic construct
  source 1..25: mol_type = other DNA
caatatgaatataattttaaaaatc

SEQ ID NO: 166 - DNA, 25 bp, synthetic construct
  source 1..25: mol_type = other DNA
gcaatatgaatataattttaaaaat

SEQ ID NO: 167 - DNA, 25 bp, synthetic construct
  source 1..25: mol_type = other DNA
tgcaatatgaatataattttaaaaa

SEQ ID NO: 168 - DNA, 25 bp, synthetic construct
  source 1..25: mol_type = other DNA
ctgcaatatgaatataattttaaaa

SEQ ID NO: 169 - DNA, 25 bp, synthetic construct
  source 1..25: mol_type = other DNA
cctgcaatatgaatataattttaaa

SEQ ID NO: 170 - DNA, 25 bp, synthetic construct
  source 1..25: mol_type = other DNA
tcctgcaatatgaatataattttaa

SEQ ID NO: 171 - DNA, 25 bp, synthetic construct
  source 1..25: mol_type = other DNA
gtcctgcaatatgaatataatttta

SEQ ID NO: 172 - DNA, 25 bp, synthetic construct
  source 1..25: mol_type = other DNA
agtcctgcaatatgaatataatttt

SEQ ID NO: 173 - DNA, 25 bp, synthetic construct
  source 1..25: mol_type = other DNA
gagtcctgcaatatgaatataattt

SEQ ID NO: 174 - DNA, 25 bp, synthetic construct
  source 1..25: mol_type = other DNA
cgagtcctgcaatatgaatataatt

SEQ ID NO: 175 - DNA, 25 bp, synthetic construct
  source 1..25: mol_type = other DNA
ccgagtcctgcaatatgaatataat

SEQ ID NO: 176 - DNA, 25 bp, synthetic construct
  source 1..25: mol_type = other DNA
gccgagtcctgcaatatgaatataa

SEQ ID NO: 177 - DNA, 25 bp, synthetic construct
  source 1..25: mol_type = other DNA
tgccgagtcctgcaatatgaatata

SEQ ID NO: 178 - DNA, 25 bp, synthetic construct
  source 1..25: mol_type = other DNA
ctgccgagtcctgcaatatgaatat

SEQ ID NO: 179 - DNA, 25 bp, synthetic construct
  source 1..25: mol_type = other DNA
tctgccgagtcctgcaatatgaata

SEQ ID NO: 180 - DNA, 25 bp, synthetic construct
  source 1..25: mol_type = other DNA
ttctgccgagtcctgcaatatgaat

SEQ ID NO: 181 - DNA, 25 bp, synthetic construct
  source 1..25: mol_type = other DNA
cttctgccgagtcctgcaatatgaa

SEQ ID NO: 182 - DNA, 25 bp, synthetic construct
  source 1..25: mol_type = other DNA
tcttctgccgagtcctgcaatatga

SEQ ID NO: 183 - DNA, 25 bp, synthetic construct
  source 1..25: mol_type = other DNA
gtcttctgccgagtcctgcaatatg

SEQ ID NO: 184 - DNA, 25 bp, synthetic construct
  source 1..25: mol_type = other DNA
ggtcttctgccgagtcctgcaatat

SEQ ID NO: 185 - DNA, 25 bp, synthetic construct
  source 1..25: mol_type = other DNA
aggtcttctgccgagtcctgcaata

SEQ ID NO: 186 - DNA, 25 bp, synthetic construct
  source 1..25: mol_type = other DNA
aaggtcttctgccgagtcctgcaat

SEQ ID NO: 187 - DNA, 25 bp, synthetic construct
  source 1..25: mol_type = other DNA
gaaggtcttctgccgagtcctgcaa

SEQ ID NO: 188 - DNA, 25 bp, synthetic construct
  source 1..25: mol_type = other DNA
cgaaggtcttctgccgagtcctgca

SEQ ID NO: 189 - DNA, 25 bp, synthetic construct
  source 1..25: mol_type = other DNA
tcgaaggtcttctgccgagtcctgc

SEQ ID NO: 190 - DNA, 25 bp, synthetic construct
  source 1..25: mol_type = other DNA
ctcgaaggtcttctgccgagtcctg

SEQ ID NO: 191 - DNA, 25 bp, synthetic construct
  source 1..25: mol_type = other DNA
tctcgaaggtcttctgccgagtcct

SEQ ID NO: 192 - DNA, 25 bp, synthetic construct
  source 1..25: mol_type = other DNA
ctctcgaaggtcttctgccgagtcc

SEQ ID NO: 193 - DNA, 25 bp, synthetic construct
  source 1..25: mol_type = other DNA
tctctcgaaggtcttctgccgagtc

SEQ ID NO: 194 - DNA, 25 bp, synthetic construct
  source 1..25: mol_type = other DNA
ttctctcgaaggtcttctgccgagt

SEQ ID NO: 195 - DNA, 25 bp, synthetic construct
  source 1..25: mol_type = other DNA
tttctctcgaaggtcttctgccgag

SEQ ID NO: 196 - DNA, 25 bp, synthetic construct
  source 1..25: mol_type = other DNA
ctttctctcgaaggtcttctgccga

SEQ ID NO: 197 - DNA, 25 bp, synthetic construct
  source 1..25: mol_type = other DNA
cctttctctcgaaggtcttctgccg

SEQ ID NO: 198 - DNA, 25 bp, synthetic construct
  source 1..25: mol_type = other DNA
acctttctctcgaaggtcttctgcc

SEQ ID NO: 199 - DNA, 25 bp, synthetic construct
  source 1..25: mol_type = other DNA
tacctttctctcgaaggtcttctgc

SEQ ID NO: 200 - DNA, 25 bp, synthetic construct
  source 1..25: mol_type = other DNA
ctacctttctctcgaaggtcttctg

SEQ ID NO: 201 - DNA, 25 bp, synthetic construct
  source 1..25: mol_type = other DNA
tctacctttctctcgaaggtcttct

SEQ ID NO: 202 - DNA, 25 bp, synthetic construct
  source 1..25: mol_type = other DNA
ttctacctttctctcgaaggtcttc

SEQ ID NO: 203 - DNA, 25 bp, synthetic construct
  source 1..25: mol_type = other DNA
tttctacctttctctcgaaggtctt

SEQ ID NO: 204 - DNA, 25 bp, synthetic construct
  source 1..25: mol_type = other DNA
ttttctacctttctctcgaaggtct

SEQ ID NO: 205 - DNA, 25 bp, synthetic construct
  source 1..25: mol_type = other DNA
attttctacctttctctcgaaggtc

SEQ ID NO: 206 - DNA, 25 bp, synthetic construct
  source 1..25: mol_type = other DNA
tattttctacctttctctcgaaggt

SEQ ID NO: 207 - DNA, 25 bp, synthetic construct
  source 1..25: mol_type = other DNA
ttattttctacctttctctcgaagg

SEQ ID NO: 208 - DNA, 25 bp, synthetic construct
  source 1..25: mol_type = other DNA
cttattttctacctttctctcgaag

SEQ ID NO: 209 - DNA, 25 bp, synthetic construct
  source 1..25: mol_type = other DNA
tcttattttctacctttctctcgaa

SEQ ID NO: 210 - DNA, 25 bp, synthetic construct
  source 1..25: mol_type = other DNA
ttcttattttctacctttctctcga

SEQ ID NO: 211 - DNA, 25 bp, synthetic construct
  source 1..25: mol_type = other DNA
attcttattttctacctttctctcg

SEQ ID NO: 212 - DNA, 25 bp, synthetic construct
  source 1..25: mol_type = other DNA
aattcttattttctacctttctctc

SEQ ID NO: 213 - DNA, 25 bp, synthetic construct
  source 1..25: mol_type = other DNA
aaattcttattttctacctttctct

SEQ ID NO: 214 - DNA, 25 bp, synthetic construct
  source 1..25: mol_type = other DNA
caaattcttattttctacctttctc

SEQ ID NO: 215 - DNA, 25 bp, synthetic construct
  source 1..25: mol_type = other DNA
ccaaattcttattttctacctttct

SEQ ID NO: 216 - DNA, 25 bp, synthetic construct
  source 1..25: mol_type = other DNA
gccaaattcttattttctacctttc

SEQ ID NO: 217 - DNA, 25 bp, synthetic construct
  source 1..25: mol_type = other DNA
agccaaattcttattttctaccttt

SEQ ID NO: 218 - DNA, 25 bp, synthetic construct
  source 1..25: mol_type = other DNA
gagccaaattcttattttctacctt

SEQ ID NO: 219 - DNA, 25 bp, synthetic construct
  source 1..25: mol_type = other DNA
agagccaaattcttattttctacct

SEQ ID NO: 220 - DNA, 25 bp, synthetic construct
  source 1..25: mol_type = other DNA
gagagccaaattcttattttctacc

SEQ ID NO: 221 - DNA, 25 bp, synthetic construct
  source 1..25: mol_type = other DNA
agagagccaaattcttattttctac

SEQ ID NO: 222 - DNA, 25 bp, synthetic construct
  source 1..25: mol_type = other DNA
cagagagccaaattcttattttcta

SEQ ID NO: 223 - DNA, 25 bp, synthetic construct
  source 1..25: mol_type = other DNA
acagagagccaaattcttattttct

SEQ ID NO: 224 - DNA, 25 bp, synthetic construct
  source 1..25: mol_type = other DNA
cacagagagccaaattcttattttc

SEQ ID NO: 225 - DNA, 25 bp, synthetic construct
  source 1..25: mol_type = other DNA
acacagagagccaaattcttatttt

SEQ ID NO: 226 - DNA, 25 bp, synthetic construct
  source 1..25: mol_type = other DNA
cacacagagagccaaattcttattt

SEQ ID NO: 227 - DNA, 25 bp, synthetic construct
  source 1..25: mol_type = other DNA
tcacacagagagccaaattcttatt

SEQ ID NO: 228 - DNA, 25 bp, synthetic construct
  source 1..25: mol_type = other DNA
ctcacacagagagccaaattcttat

SEQ ID NO: 229 - DNA, 25 bp, synthetic construct
  source 1..25: mol_type = other DNA
gctcacacagagagccaaattctta

SEQ ID NO: 230 - DNA, 25 bp, synthetic construct
  source 1..25: mol_type = other DNA
tgctcacacagagagccaaattctt

SEQ ID NO: 231 - DNA, 25 bp, synthetic construct
  source 1..25: mol_type = other DNA
atgctcacacagagagccaaattct

SEQ ID NO: 232 - DNA, 25 bp, synthetic construct
  source 1..25: mol_type = other DNA
catgctcacacagagagccaaattc

SEQ ID NO: 233 - DNA, 25 bp, synthetic construct
  source 1..25: mol_type = other DNA
acatgctcacacagagagccaaatt

SEQ ID NO: 234 - DNA, 25 bp, synthetic construct
  source 1..25: mol_type = other DNA
cacatgctcacacagagagccaaat

SEQ ID NO: 235 - DNA, 25 bp, synthetic construct
  source 1..25: mol_type = other DNA
acacatgctcacacagagagccaaa

SEQ ID NO: 236 - DNA, 25 bp, synthetic construct
  source 1..25: mol_type = other DNA
cacacatgctcacacagagagccaa

SEQ ID NO: 237 - DNA, 25 bp, synthetic construct
  source 1..25: mol_type = other DNA
gcacacatgctcacacagagagcca

SEQ ID NO: 238 - DNA, 25 bp, synthetic construct
  source 1..25: mol_type = other DNA
cgcacacatgctcacacagagagcc

SEQ ID NO: 239 - DNA, 25 bp, synthetic construct
  source 1..25: mol_type = other DNA
acgcacacatgctcacacagagagc

SEQ ID NO: 240 - DNA, 25 bp, synthetic construct
  source 1..25: mol_type = other DNA
cacgcacacatgctcacacagagag

SEQ ID NO: 241 - DNA, 25 bp, synthetic construct
  source 1..25: mol_type = other DNA
acacgcacacatgctcacacagaga

SEQ ID NO: 242 - DNA, 25 bp, synthetic construct
  source 1..25: mol_type = other DNA
cacacgcacacatgctcacacagag

SEQ ID NO: 243 - DNA, 25 bp, synthetic construct
  source 1..25: mol_type = other DNA
acacacgcacacatgctcacacaga

SEQ ID NO: 244 - DNA, 25 bp, synthetic construct
  source 1..25: mol_type = other DNA
cacacacgcacacatgctcacacag

SEQ ID NO: 245 - DNA, 25 bp, synthetic construct
  source 1..25: mol_type = other DNA
gcacacacgcacacatgctcacaca

SEQ ID NO: 246 - DNA, 25 bp, synthetic construct
  source 1..25: mol_type = other DNA
cgcacacacgcacacatgctcacac

SEQ ID NO: 247 - DNA, 25 bp, synthetic construct
  source 1..25: mol_type = other DNA
tcgcacacacgcacacatgctcaca

SEQ ID NO: 248 - DNA, 25 bp, synthetic construct
  source 1..25: mol_type = other DNA
ctcgcacacacgcacacatgctcac

SEQ ID NO: 249 - DNA, 25 bp, synthetic construct
  source 1..25: mol_type = other DNA
tctcgcacacacgcacacatgctca

SEQ ID NO: 250 - DNA, 25 bp, synthetic construct
  source 1..25: mol_type = other DNA
ctctcgcacacacgcacacatgctc

SEQ ID NO: 251 - DNA, 25 bp, synthetic construct
  source 1..25: mol_type = other DNA
tctctcgcacacacgcacacatgct

SEQ ID NO: 252 - DNA, 25 bp, synthetic construct
  source 1..25: mol_type = other DNA
ctctctcgcacacacgcacacatgc

SEQ ID NO: 253 - DNA, 25 bp, synthetic construct
  source 1..25: mol_type = other DNA
tctctctcgcacacacgcacacatg

SEQ ID NO: 254 - DNA, 25 bp, synthetic construct
  source 1..25: mol_type = other DNA
ctctctctcgcacacacgcacacat

SEQ ID NO: 255 - DNA, 25 bp, synthetic construct
  source 1..25: mol_type = other DNA
tctctctctcgcacacacgcacaca

SEQ ID NO: 256 - DNA, 25 bp, synthetic construct
  source 1..25: mol_type = other DNA
ctctctctctcgcacacacgcacac

SEQ ID NO: 257 - DNA, 25 bp, synthetic construct
  source 1..25: mol_type = other DNA
tctctctctctcgcacacacgcaca

SEQ ID NO: 258 - DNA, 25 bp, synthetic construct
  source 1..25: mol_type = other DNA
gtctctctctctcgcacacacgcac

SEQ ID NO: 259 - DNA, 25 bp, synthetic construct
  source 1..25: mol_type = other DNA
tgtctctctctctcgcacacacgca

SEQ ID NO: 260 - DNA, 25 bp, synthetic construct
  source 1..25: mol_type = other DNA
ctgtctctctctctcgcacacacgc

SEQ ID NO: 261 - DNA, 25 bp, synthetic construct
  source 1..25: mol_type = other DNA
tctgtctctctctctcgcacacacg

SEQ ID NO: 262 - DNA, 25 bp, synthetic construct
  source 1..25: mol_type = other DNA
gtctgtctctctctctcgcacacac

SEQ ID NO: 263 - DNA, 25 bp, synthetic construct
  source 1..25: mol_type = other DNA
tgtctgtctctctctctcgcacaca

SEQ ID NO: 264 - DNA, 25 bp, synthetic construct
  source 1..25: mol_type = other DNA
ctgtctgtctctctctctcgcacac

SEQ ID NO: 265 - DNA, 25 bp, synthetic construct
  source 1..25: mol_type = other DNA
gctgtctgtctctctctctcgcaca

SEQ ID NO: 266 - DNA, 25 bp, synthetic construct
  source 1..25: mol_type = other DNA
ggctgtctgtctctctctctcgcac

SEQ ID NO: 267 - DNA, 25 bp, synthetic construct
  source 1..25: mol_type = other DNA
aggctgtctgtctctctctctcgca

SEQ ID NO: 268 - DNA, 25 bp, synthetic construct
  source 1..25: mol_type = other DNA
caggctgtctgtctctctctctcgc

SEQ ID NO: 269 - DNA, 25 bp, synthetic construct
  source 1..25: mol_type = other DNA
gcaggctgtctgtctctctctctcg

SEQ ID NO: 270 - DNA, 25 bp, synthetic construct
  source 1..25: mol_type = other DNA
ggcaggctgtctgtctctctctctc

SEQ ID NO: 271 - DNA, 25 bp, synthetic construct
  source 1..25: mol_type = other DNA
aggcaggctgtctgtctctctctct

SEQ ID NO: 272 - DNA, 25 bp, synthetic construct
  source 1..25: mol_type = other DNA
taggcaggctgtctgtctctctctc

SEQ ID NO: 273 - DNA, 25 bp, synthetic construct
  source 1..25: mol_type = other DNA
ttaggcaggctgtctgtctctctct

SEQ ID NO: 274 - DNA, 25 bp, synthetic construct
  source 1..25: mol_type = other DNA
cttaggcaggctgtctgtctctctc

SEQ ID NO: 275 - DNA, 25 bp, synthetic construct
  source 1..25: mol_type = other DNA
tcttaggcaggctgtctgtctctct

SEQ ID NO: 276 - DNA, 25 bp, synthetic construct
  source 1..25: mol_type = other DNA
ttcttaggcaggctgtctgtctctc

SEQ ID NO: 277 - DNA, 25 bp, synthetic construct
  source 1..25: mol_type = other DNA
cttcttaggcaggctgtctgtctct

SEQ ID NO: 278 - DNA, 25 bp, synthetic construct
  source 1..25: mol_type = other DNA
tcttcttaggcaggctgtctgtctc

SEQ ID NO: 279 - DNA, 25 bp, synthetic construct
  source 1..25: mol_type = other DNA
ttcttcttaggcaggctgtctgtct

SEQ ID NO: 280 - DNA, 25 bp, synthetic construct
  source 1..25: mol_type = other DNA
tttcttcttaggcaggctgtctgtc

SEQ ID NO: 281 - DNA, 25 bp, synthetic construct
  source 1..25: mol_type = other DNA
atttcttcttaggcaggctgtctgt

SEQ ID NO: 282 - DNA, 25 bp, synthetic construct
  source 1..25: mol_type = other DNA
catttcttcttaggcaggctgtctg

SEQ ID NO: 283 - DNA, 25 bp, synthetic construct
  source 1..25: mol_type = other DNA
tcatttcttcttaggcaggctgtct

SEQ ID NO: 284 - DNA, 25 bp, synthetic construct
  source 1..25: mol_type = other DNA
ttcatttcttcttaggcaggctgtc

SEQ ID NO: 285 - DNA, 25 bp, synthetic construct
  source 1..25: mol_type = other DNA
attcatttcttcttaggcaggctgt

SEQ ID NO: 286 - DNA, 25 bp, synthetic construct
  source 1..25: mol_type = other DNA
cattcatttcttcttaggcaggctg

SEQ ID NO: 287 - DNA, 25 bp, synthetic construct
  source 1..25: mol_type = other DNA
acattcatttcttcttaggcaggct

SEQ ID NO: 288 - DNA, 25 bp, synthetic construct
  source 1..25: mol_type = other DNA
cacattcatttcttcttaggcaggc

SEQ ID NO: 289 - DNA, 25 bp, synthetic construct
  source 1..25: mol_type = other DNA
tcacattcatttcttcttaggcagg

SEQ ID NO: 290 - DNA, 25 bp, synthetic construct
  source 1..25: mol_type = other DNA
ttcacattcatttcttcttaggcag

SEQ ID NO: 291 - DNA, 25 bp, synthetic construct
  source 1..25: mol_type = other DNA
attcacattcatttcttcttaggca

SEQ ID NO: 292 - DNA, 25 bp, synthetic construct
  source 1..25: mol_type = other DNA
cattcacattcatttcttcttaggc

SEQ ID NO: 293 - DNA, 25 bp, synthetic construct
  source 1..25: mol_type = other DNA
gcattcacattcatttcttcttagg

SEQ ID NO: 294 - DNA, 25 bp, synthetic construct
  source 1..25: mol_type = other DNA
cgcattcacattcatttcttcttag

SEQ ID NO: 295 - DNA, 25 bp, synthetic construct
  source 1..25: mol_type = other DNA
ccgcattcacattcatttcttctta

SEQ ID NO: 296 - DNA, 25 bp, synthetic construct
  source 1..25: mol_type = other DNA
gccgcattcacattcatttcttctt

SEQ ID NO: 297 - DNA, 25 bp, synthetic construct
  source 1..25: mol_type = other DNA
agccgcattcacattcatttcttct

SEQ ID NO: 298 - DNA, 25 bp, synthetic construct
  source 1..25: mol_type = other DNA
aagccgcattcacattcatttcttc

SEQ ID NO: 299 - DNA, 25 bp, synthetic construct
  source 1..25: mol_type = other DNA
caagccgcattcacattcatttctt

SEQ ID NO: 300 - DNA, 25 bp, synthetic construct
  source 1..25: mol_type = other DNA
acaagccgcattcacattcatttct

SEQ ID NO: 301 - DNA, 25 bp, synthetic construct
  source 1..25: mol_type = other DNA
cacaagccgcattcacattcatttc

SEQ ID NO: 302 - DNA, 25 bp, synthetic construct
  source 1..25: mol_type = other DNA
ccacaagccgcattcacattcattt

SEQ ID NO: 303 - DNA, 25 bp, synthetic construct
  source 1..25: mol_type = other DNA
gccacaagccgcattcacattcatt

SEQ ID NO: 304 - DNA, 25 bp, synthetic construct
  source 1..25: mol_type = other DNA
tgccacaagccgcattcacattcat

SEQ ID NO: 305 - DNA, 25 bp, synthetic construct
  source 1..25: mol_type = other DNA
gtgccacaagccgcattcacattca

SEQ ID NO: 306 - DNA, 25 bp, synthetic construct
  source 1..25: mol_type = other DNA
tgtgccacaagccgcattcacattc

SEQ ID NO: 307 - DNA, 25 bp, synthetic construct
  source 1..25: mol_type = other DNA
ctgtgccacaagccgcattcacatt

SEQ ID NO: 308 - DNA, 25 bp, synthetic construct
  source 1..25: mol_type = other DNA
actgtgccacaagccgcattcacat

SEQ ID NO: 309 - DNA, 25 bp, synthetic construct
  source 1..25: mol_type = other DNA
aactgtgccacaagccgcattcaca

SEQ ID NO: 310 - DNA, 25 bp, synthetic construct
  source 1..25: mol_type = other DNA
caactgtgccacaagccgcattcac

SEQ ID NO: 311 - DNA, 25 bp, synthetic construct
  source 1..25: mol_type = other DNA
tcaactgtgccacaagccgcattca

SEQ ID NO: 312 - DNA, 25 bp, synthetic construct
  source 1..25: mol_type = other DNA
gtcaactgtgccacaagccgcattc

SEQ ID NO: 313 - DNA, 25 bp, synthetic construct
  source 1..25: mol_type = other DNA
tgtcaactgtgccacaagccgcatt

SEQ ID NO: 314 - DNA, 25 bp, synthetic construct
  source 1..25: mol_type = other DNA
ttgtcaactgtgccacaagccgcat

SEQ ID NO: 315 - DNA, 25 bp, synthetic construct
  source 1..25: mol_type = other DNA
cttgtcaactgtgccacaagccgca

SEQ ID NO: 316 - DNA, 25 bp, synthetic construct
  source 1..25: mol_type = other DNA
ccttgtcaactgtgccacaagccgc

SEQ ID NO: 317 - DNA, 25 bp, synthetic construct
  source 1..25: mol_type = other DNA
tccttgtcaactgtgccacaagccg

SEQ ID NO: 318 - DNA, 25 bp, synthetic construct
  source 1..25: mol_type = other DNA
atccttgtcaactgtgccacaagcc

SEQ ID NO: 319 - DNA, 25 bp, synthetic construct
  source 1..25: mol_type = other DNA
catccttgtcaactgtgccacaagc

SEQ ID NO: 320 - DNA, 25 bp, synthetic construct
  source 1..25: mol_type = other DNA
tcatccttgtcaactgtgccacaag

SEQ ID NO: 321 - DNA, 25 bp, synthetic construct
  source 1..25: mol_type = other DNA
atcatccttgtcaactgtgccacaa

SEQ ID NO: 322 - DNA, 25 bp, synthetic construct
  source 1..25: mol_type = other DNA
tatcatccttgtcaactgtgccaca

SEQ ID NO: 323 - DNA, 25 bp, synthetic construct
  source 1..25: mol_type = other DNA
ttatcatccttgtcaactgtgccac

SEQ ID NO: 324 - DNA, 25 bp, synthetic construct
  source 1..25: mol_type = other DNA
tttatcatccttgtcaactgtgcca

SEQ ID NO: 325 - DNA, 25 bp, synthetic construct
  source 1..25: mol_type = other DNA
atttatcatccttgtcaactgtgcc

SEQ ID NO: 326 - DNA, 25 bp, synthetic construct
  source 1..25: mol_type = other DNA
gatttatcatccttgtcaactgtgc

SEQ ID NO: 327 - DNA, 25 bp, synthetic construct
  source 1..25: mol_type = other DNA
tgatttatcatccttgtcaactgtg

SEQ ID NO: 328 - DNA, 25 bp, synthetic construct
  source 1..25: mol_type = other DNA
ttgatttatcatccttgtcaactgt

SEQ ID NO: 329 - DNA, 25 bp, synthetic construct
  source 1..25: mol_type = other DNA
attgatttatcatccttgtcaactg

SEQ ID NO: 330 - DNA, 25 bp, synthetic construct
  source 1..25: mol_type = other DNA
tattgatttatcatccttgtcaact

SEQ ID NO: 331 - DNA, 25 bp, synthetic construct
  source 1..25: mol_type = other DNA
ttattgatttatcatccttgtcaac

SEQ ID NO: 332 - DNA, 25 bp, synthetic construct
  source 1..25: mol_type = other DNA
attattgatttatcatccttgtcaa

SEQ ID NO: 333 - DNA, 25 bp, synthetic construct
  source 1..25: mol_type = other DNA
cattattgatttatcatccttgtca

SEQ ID NO: 334 - DNA, 25 bp, synthetic construct
  source 1..25: mol_type = other DNA
gcattattgatttatcatccttgtc

SEQ ID NO: 335 - DNA, 25 bp, synthetic construct
  source 1..25: mol_type = other DNA
tgcattattgatttatcatccttgt

SEQ ID NO: 336 - DNA, 25 bp, synthetic construct
  source 1..25: mol_type = other DNA
ttgcattattgatttatcatccttg

SEQ ID NO: 337 - DNA, 25 bp, synthetic construct
  source 1..25: mol_type = other DNA
cttgcattattgatttatcatcctt

SEQ ID NO: 338 - DNA, 25 bp, synthetic construct
  source 1..25: mol_type = other DNA
gcttgcattattgatttatcatcct

SEQ ID NO: 339 - DNA, 25 bp, synthetic construct
  source 1..25: mol_type = other DNA
agcttgcattattgatttatcatcc

SEQ ID NO: 340 - DNA, 25 bp, synthetic construct
  source 1..25: mol_type = other DNA
aagcttgcattattgatttatcatc

SEQ ID NO: 341 - DNA, 25 bp, synthetic construct
  source 1..25: mol_type = other DNA
taagcttgcattattgatttatcat

SEQ ID NO: 342 - DNA, 25 bp, synthetic construct
  source 1..25: mol_type = other DNA
gtaagcttgcattattgatttatca

SEQ ID NO: 343 - DNA, 25 bp, synthetic construct
  source 1..25: mol_type = other DNA
agtaagcttgcattattgatttatc

SEQ ID NO: 344 - DNA, 25 bp, synthetic construct
  source 1..25: mol_type = other DNA
tagtaagcttgcattattgatttat

SEQ ID NO: 345 - DNA, 25 bp, synthetic construct
  source 1..25: mol_type = other DNA
atagtaagcttgcattattgattta

SEQ ID NO: 346 - DNA, 25 bp, synthetic construct
  source 1..25: mol_type = other DNA
gatagtaagcttgcattattgattt

SEQ ID NO: 347 - DNA, 25 bp, synthetic construct
  source 1..25: mol_type = other DNA
tgatagtaagcttgcattattgatt

SEQ ID NO: 348 - DNA, 25 bp, synthetic construct
  source 1..25: mol_type = other DNA
atgatagtaagcttgcattattgat

SEQ ID NO: 349 - DNA, 25 bp, synthetic construct
  source 1..25: mol_type = other DNA
aatgatagtaagcttgcattattga

SEQ ID NO: 350 - DNA, 25 bp, synthetic construct
  source 1..25: mol_type = other DNA
aaatgatagtaagcttgcattattg

SEQ ID NO: 351 - DNA, 25 bp, synthetic construct
  source 1..25: mol_type = other DNA
taaatgatagtaagcttgcattatt

SEQ ID NO: 352 - DNA, 25 bp, synthetic construct
  source 1..25: mol_type = other DNA
ataaatgatagtaagcttgcattat

SEQ ID NO: 353 - DNA, 25 bp, synthetic construct
  source 1..25: mol_type = other DNA
cataaatgatagtaagcttgcatta

SEQ ID NO: 354 - DNA, 25 bp, synthetic construct
  source 1..25: mol_type = other DNA
tcataaatgatagtaagcttgcatt

SEQ ID NO: 355 - DNA, 25 bp, synthetic construct
  source 1..25: mol_type = other DNA
ttcataaatgatagtaagcttgcat

SEQ ID NO: 356 - DNA, 25 bp, synthetic construct
  source 1..25: mol_type = other DNA
attcataaatgatagtaagcttgca

SEQ ID NO: 357 - DNA, 25 bp, synthetic construct
  source 1..25: mol_type = other DNA
tattcataaatgatagtaagcttgc

SEQ ID NO: 358 - DNA, 25 bp, synthetic construct
  source 1..25: mol_type = other DNA
ctattcataaatgatagtaagcttg

SEQ ID NO: 359 - DNA, 25 bp, synthetic construct
  source 1..25: mol_type = other DNA
gctattcataaatgatagtaagctt

SEQ ID NO: 360 - DNA, 25 bp, synthetic construct
  source 1..25: mol_type = other DNA
tgctattcataaatgatagtaagct

SEQ ID NO: 361 - DNA, 25 bp, synthetic construct
  source 1..25: mol_type = other DNA
ttgctattcataaatgatagtaagc

SEQ ID NO: 362 - DNA, 25 bp, synthetic construct
  source 1..25: mol_type = other DNA
attgctattcataaatgatagtaag

SEQ ID NO: 363 - DNA, 25 bp, synthetic construct
  source 1..25: mol_type = other DNA
tattgctattcataaatgatagtaa

SEQ ID NO: 364 - DNA, 25 bp, synthetic construct
  source 1..25: mol_type = other DNA
gtattgctattcataaatgatagta

SEQ ID NO: 365 - DNA, 25 bp, synthetic construct
  source 1..25: mol_type = other DNA
agtattgctattcataaatgatagt

SEQ ID NO: 366 - DNA, 25 bp, synthetic construct
  source 1..25: mol_type = other DNA
cagtattgctattcataaatgatag

SEQ ID NO: 367 - DNA, 25 bp, synthetic construct
  source 1..25: mol_type = other DNA
tcagtattgctattcataaatgata

SEQ ID NO: 368 - DNA, 25 bp, synthetic construct
  source 1..25: mol_type = other DNA
ttcagtattgctattcataaatgat

SEQ ID NO: 369 - DNA, 25 bp, synthetic construct
  source 1..25: mol_type = other DNA
cttcagtattgctattcataaatga

SEQ ID NO: 370 - DNA, 25 bp, synthetic construct
  source 1..25: mol_type = other DNA
tcttcagtattgctattcataaatg

SEQ ID NO: 371 - DNA, 25 bp, synthetic construct
  source 1..25: mol_type = other DNA
ttcttcagtattgctattcataaat

SEQ ID NO: 372 - DNA, 25 bp, synthetic construct
  source 1..25: mol_type = other DNA
tttcttcagtattgctattcataaa

SEQ ID NO: 373 - DNA, 25 bp, synthetic construct
  source 1..25: mol_type = other DNA
atttcttcagtattgctattcataa

SEQ ID NO: 374 - DNA, 25 bp, synthetic construct
  source 1..25: mol_type = other DNA
aatttcttcagtattgctattcata

SEQ ID NO: 375 - DNA, 25 bp, synthetic construct
  source 1..25: mol_type = other DNA
taatttcttcagtattgctattcat

SEQ ID NO: 376 - DNA, 25 bp, synthetic construct
  source 1..25: mol_type = other DNA
ttaatttcttcagtattgctattca

SEQ ID NO: 377 - DNA, 25 bp, synthetic construct
  source 1..25: mol_type = other DNA
tttaatttcttcagtattgctattc

SEQ ID NO: 378 - DNA, 25 bp, synthetic construct
  source 1..25: mol_type = other DNA
ttttaatttcttcagtattgctatt

SEQ ID NO: 379 - DNA, 25 bp, synthetic construct
  source 1..25: mol_type = other DNA
gttttaatttcttcagtattgctat

SEQ ID NO: 380 - DNA, 25 bp, synthetic construct
  source 1..25: mol_type = other DNA
tgttttaatttcttcagtattgcta

SEQ ID NO: 381 - DNA, 25 bp, synthetic construct
  source 1..25: mol_type = other DNA
ttgttttaatttcttcagtattgct

SEQ ID NO: 382 - DNA, 25 bp, synthetic construct
  source 1..25: mol_type = other DNA
tttgttttaatttcttcagtattgc

SEQ ID NO: 383 - DNA, 25 bp, synthetic construct
  source 1..25: mol_type = other DNA
ttttgttttaatttcttcagtattg

SEQ ID NO: 384 - DNA, 25 bp, synthetic construct
  source 1..25: mol_type = other DNA
cttttgttttaatttcttcagtatt

SEQ ID NO: 385 - DNA, 25 bp, synthetic construct
  source 1..25: mol_type = other DNA
tcttttgttttaatttcttcagtat

SEQ ID NO: 386 - DNA, 25 bp, synthetic construct
  source 1..25: mol_type = other DNA
atcttttgttttaatttcttcagta

SEQ ID NO: 387 - DNA, 25 bp, synthetic construct
  source 1..25: mol_type = other DNA
aatcttttgttttaatttcttcagt

SEQ ID NO: 388 - DNA, 25 bp, synthetic construct
  source 1..25: mol_type = other DNA
caatcttttgttttaatttcttcag

SEQ ID NO: 389 - DNA, 25 bp, synthetic construct
  source 1..25: mol_type = other DNA
gcaatcttttgttttaatttcttca

SEQ ID NO: 390 - DNA, 25 bp, synthetic construct
  source 1..25: mol_type = other DNA
agcaatcttttgttttaatttcttc

SEQ ID NO: 391 - DNA, 25 bp, synthetic construct
  source 1..25: mol_type = other DNA
cagcaatcttttgttttaatttctt

SEQ ID NO: 392 - DNA, 25 bp, synthetic construct
  source 1..25: mol_type = other DNA
acagcaatcttttgttttaatttct

SEQ ID NO: 393 - DNA, 25 bp, synthetic construct
  source 1..25: mol_type = other DNA
gacagcaatcttttgttttaatttc

SEQ ID NO: 394 - DNA, 25 bp, synthetic construct
  source 1..25: mol_type = other DNA
agacagcaatcttttgttttaattt

SEQ ID NO: 395 - DNA, 25 bp, synthetic construct
  source 1..25: mol_type = other DNA
gagacagcaatcttttgttttaatt

SEQ ID NO: 396 - DNA, 25 bp, synthetic construct
  source 1..25: mol_type = other DNA
tgagacagcaatcttttgttttaat

SEQ ID NO: 397 - DNA, 25 bp, synthetic construct
  source 1..25: mol_type = other DNA
ttgagacagcaatcttttgttttaa

SEQ ID NO: 398 - DNA, 25 bp, synthetic construct
  source 1..25: mol_type = other DNA
attgagacagcaatcttttgtttta

SEQ ID NO: 399 - DNA, 25 bp, synthetic construct
  source 1..25: mol_type = other DNA
tattgagacagcaatcttttgtttt

SEQ ID NO: 400 - DNA, 25 bp, synthetic construct
  source 1..25: mol_type = other DNA
atattgagacagcaatcttttgttt

SEQ ID NO: 401 - DNA, 25 bp, synthetic construct
  source 1..25: mol_type = other DNA
tatattgagacagcaatcttttgtt

SEQ ID NO: 402 - DNA, 25 bp, synthetic construct
  source 1..25: mol_type = other DNA
atatattgagacagcaatcttttgt

SEQ ID NO: 403 - DNA, 25 bp, synthetic construct
  source 1..25: mol_type = other DNA
gatatattgagacagcaatcttttg

SEQ ID NO: 404 - DNA, 25 bp, synthetic construct
  source 1..25: mol_type = other DNA
agatatattgagacagcaatctttt

SEQ ID NO: 405 - DNA, 25 bp, synthetic construct
  source 1..25: mol_type = other DNA
aagatatattgagacagcaatcttt

SEQ ID NO: 406 - DNA, 25 bp, synthetic construct
  source 1..25: mol_type = other DNA
taagatatattgagacagcaatctt

SEQ ID NO: 407 - DNA, 25 bp, synthetic construct
  source 1..25: mol_type = other DNA
ataagatatattgagacagcaatct

SEQ ID NO: 408 - DNA, 25 bp, synthetic construct
  source 1..25: mol_type = other DNA
tataagatatattgagacagcaatc

SEQ ID NO: 409 - DNA, 25 bp, synthetic construct
  source 1..25: mol_type = other DNA
atataagatatattgagacagcaat

SEQ ID NO: 410 - DNA, 25 bp, synthetic construct
  source 1..25: mol_type = other DNA
aatataagatatattgagacagcaa

SEQ ID NO: 411 - DNA, 25 bp, synthetic construct
  source 1..25: mol_type = other DNA
aaatataagatatattgagacagca

SEQ ID NO: 412 - DNA, 25 bp, synthetic construct
  source 1..25: mol_type = other DNA
taaatataagatatattgagacagc

SEQ ID NO: 413 - DNA, 25 bp, synthetic construct
  source 1..25: mol_type = other DNA
ataaatataagatatattgagacag

SEQ ID NO: 414 - DNA, 25 bp, synthetic construct
  source 1..25: mol_type = other DNA
aataaatataagatatattgagaca

SEQ ID NO: 415 - DNA, 25 bp, synthetic construct
  source 1..25: mol_type = other DNA
taataaatataagatatattgagac

SEQ ID NO: 416 - DNA, 25 bp, synthetic construct
  source 1..25: mol_type = other DNA
ataataaatataagatatattgaga

SEQ ID NO: 417 - DNA, 25 bp, synthetic construct
  source 1..25: mol_type = other DNA
aataataaatataagatatattgag

SEQ ID NO: 418 - DNA, 25 bp, synthetic construct
  source 1..25: mol_type = other DNA
aaataataaatataagatatattga

SEQ ID NO: 419 - DNA, 25 bp, synthetic construct
  source 1..25: mol_type = other DNA
taaataataaatataagatatattg

SEQ ID NO: 420 - DNA, 25 bp, synthetic construct
  source 1..25: mol_type = other DNA
gtaaataataaatataagatatatt

SEQ ID NO: 421 - DNA, 25 bp, synthetic construct
  source 1..25: mol_type = other DNA
ggtaaataataaatataagatatat

SEQ ID NO: 422 - DNA, 25 bp, synthetic construct
  source 1..25: mol_type = other DNA
tggtaaataataaatataagatata

SEQ ID NO: 423 - DNA, 25 bp, synthetic construct
  source 1..25: mol_type = other DNA
ttggtaaataataaatataagatat

SEQ ID NO: 424 - DNA, 25 bp, synthetic construct
  source 1..25: mol_type = other DNA
tttggtaaataataaatataagata

SEQ ID NO: 425 - DNA, 25 bp, synthetic construct
  source 1..25: mol_type = other DNA
atttggtaaataataaatataagat

SEQ ID NO: 426 - DNA, 25 bp, synthetic construct
  source 1..25: mol_type = other DNA
aatttggtaaataataaatataaga

SEQ ID NO: 427 - DNA, 25 bp, synthetic construct
  source 1..25: mol_type = other DNA
taatttggtaaataataaatataag

SEQ ID NO: 428 - DNA, 25 bp, synthetic construct
  source 1..25: mol_type = other DNA
ataatttggtaaataataaatataa

SEQ ID NO: 429 - DNA, 25 bp, synthetic construct
  source 1..25: mol_type = other DNA
aataatttggtaaataataaatata

SEQ ID NO: 430 - DNA, 25 bp, synthetic construct
  source 1..25: mol_type = other DNA
gaataatttggtaaataataaatat

SEQ ID NO: 431 - DNA, 25 bp, synthetic construct
  source 1..25: mol_type = other DNA
agaataatttggtaaataataaata

SEQ ID NO: 432 - DNA, 25 bp, synthetic construct
  source 1..25: mol_type = other DNA
tagaataatttggtaaataataaat

SEQ ID NO: 433 - DNA, 25 bp, synthetic construct
  source 1..25: mol_type = other DNA
ttagaataatttggtaaataataaa

SEQ ID NO: 434 - DNA, 25 bp, synthetic construct
  source 1..25: mol_type = other DNA
cttagaataatttggtaaataataa

SEQ ID NO: 435 - DNA, 25 bp, synthetic construct
  source 1..25: mol_type = other DNA
tcttagaataatttggtaaataata

SEQ ID NO: 436 - DNA, 25 bp, synthetic construct
  source 1..25: mol_type = other DNA
ctcttagaataatttggtaaataat

SEQ ID NO: 437 - DNA, 25 bp, synthetic construct
  source 1..25: mol_type = other DNA
actcttagaataatttggtaaataa

SEQ ID NO: 438 - DNA, 25 bp, synthetic construct
  source 1..25: mol_type = other DNA
tactcttagaataatttggtaaata

SEQ ID NO: 439 - DNA, 25 bp, synthetic construct
  source 1..25: mol_type = other DNA
atactcttagaataatttggtaaat

SEQ ID NO: 440 - DNA, 25 bp, synthetic construct
  source 1..25: mol_type = other DNA
aatactcttagaataatttggtaaa

SEQ ID NO: 441 - DNA, 25 bp, synthetic construct
  source 1..25: mol_type = other DNA
aaatactcttagaataatttggtaa

SEQ ID NO: 442 - DNA, 25 bp, synthetic construct
  source 1..25: mol_type = other DNA
gaaatactcttagaataatttggta

SEQ ID NO: 443 - DNA, 25 bp, synthetic construct
  source 1..25: mol_type = other DNA
agaaatactcttagaataatttggt

SEQ ID NO: 444 - DNA, 25 bp, synthetic construct
  source 1..25: mol_type = other DNA
aagaaatactcttagaataatttgg

SEQ ID NO: 445 - DNA, 25 bp, synthetic construct
  source 1..25: mol_type = other DNA
gaagaaatactcttagaataatttg

SEQ ID NO: 446 - DNA, 25 bp, synthetic construct
  source 1..25: mol_type = other DNA
ggaagaaatactcttagaataattt

SEQ ID NO: 447 - DNA, 25 bp, synthetic construct
  source 1..25: mol_type = other DNA
acttgtaatatacaggtatccctcc

SEQ ID NO: 448 - DNA, 25 bp, synthetic construct
  source 1..25: mol_type = other DNA
cttgtaatatacaggtatccctcct

SEQ ID NO: 449 - DNA, 25 bp, synthetic construct
  source 1..25: mol_type = other DNA
ttgtaatatacaggtatccctcctg

SEQ ID NO: 450 - DNA, 25 bp, synthetic construct
  source 1..25: mol_type = other DNA
tgtaatatacaggtatccctcctgg

SEQ ID NO: 451 - DNA, 25 bp, synthetic construct
  source 1..25: mol_type = other DNA
gtaatatacaggtatccctcctggt

SEQ ID NO: 452 - DNA, 25 bp, synthetic construct
  source 1..25: mol_type = other DNA
taatatacaggtatccctcctggta

SEQ ID NO: 453 - DNA, 25 bp, synthetic construct
  source 1..25: mol_type = other DNA
aatatacaggtatccctcctggtaa

SEQ ID NO: 454 - DNA, 25 bp, synthetic construct
  source 1..25: mol_type = other DNA
atatacaggtatccctcctggtaag

SEQ ID NO: 455 - DNA, 25 bp, synthetic construct
  source 1..25: mol_type = other DNA
tatacaggtatccctcctggtaagc

SEQ ID NO: 456 - DNA, 25 bp, synthetic construct
  source 1..25: mol_type = other DNA
atacaggtatccctcctggtaagct

SEQ ID NO: 457 - DNA, 25 bp, synthetic construct
  source 1..25: mol_type = other DNA
tacaggtatccctcctggtaagctc

SEQ ID NO: 458 - DNA, 25 bp, synthetic construct
  source 1..25: mol_type = other DNA
acaggtatccctcctggtaagctct

SEQ ID NO: 459 - DNA, 25 bp, synthetic construct
  source 1..25: mol_type = other DNA
caggtatccctcctggtaagctctg

SEQ ID NO: 460 - DNA, 25 bp, synthetic construct
  source 1..25: mol_type = other DNA
aggtatccctcctggtaagctctgg

SEQ ID NO: 461 - DNA, 25 bp, synthetic construct
  source 1..25: mol_type = other DNA
ggtatccctcctggtaagctctggt

SEQ ID NO: 462 - DNA, 25 bp, synthetic construct
  source 1..25: mol_type = other DNA
gtatccctcctggtaagctctggta

SEQ ID NO: 463 - DNA, 25 bp, synthetic construct
  source 1..25: mol_type = other DNA
tatccctcctggtaagctctggtat

SEQ ID NO: 464 - DNA, 25 bp, synthetic construct
  source 1..25: mol_type = other DNA
atccctcctggtaagctctggtatt

SEQ ID NO: 465 - DNA, 25 bp, synthetic construct
  source 1..25: mol_type = other DNA
tccctcctggtaagctctggtatta

SEQ ID NO: 466 - DNA, 25 bp, synthetic construct
  source 1..25: mol_type = other DNA
ccctcctggtaagctctggtattat

SEQ ID NO: 467 - DNA, 25 bp, synthetic construct
  source 1..25: mol_type = other DNA
cctcctggtaagctctggtattatg

SEQ ID NO: 468 - DNA, 25 bp, synthetic construct
  source 1..25: mol_type = other DNA
ctcctggtaagctctggtattatgt

SEQ ID NO: 469 - DNA, 25 bp, synthetic construct
  source 1..25: mol_type = other DNA
tcctggtaagctctggtattatgtc

SEQ ID NO: 470 - DNA, 25 bp, synthetic construct
  source 1..25: mol_type = other DNA
cctggtaagctctggtattatgtct

SEQ ID NO: 471 - DNA, 25 bp, synthetic construct
  source 1..25: mol_type = other DNA
ctggtaagctctggtattatgtctt

SEQ ID NO: 472 - DNA, 25 bp, synthetic construct
  source 1..25: mol_type = other DNA
tggtaagctctggtattatgtctta

SEQ ID NO: 473 - DNA, 25 bp, synthetic construct
  source 1..25: mol_type = other DNA
ggtaagctctggtattatgtcttaa

SEQ ID NO: 474 - DNA, 25 bp, synthetic construct
  source 1..25: mol_type = other DNA
gtaagctctggtattatgtcttaac

SEQ ID NO: 475 - DNA, 25 bp, synthetic construct
  source 1..25: mol_type = other DNA
taagctctggtattatgtcttaaca

SEQ ID NO: 476 - DNA, 25 bp, synthetic construct
  source 1..25: mol_type = other DNA
aagctctggtattatgtcttaacat

SEQ ID NO: 477 - DNA, 25 bp, Homo sapiens
  source 1..25: mol_type = genomic DNA
agctctggtattatgtcttaacatt

SEQ ID NO: 478 - DNA, 25 bp, Homo sapiens
  source 1..25: mol_type = genomic DNA
gctctggtattatgtcttaacattt

SEQ ID NO: 479 - DNA, 25 bp, Homo sapiens
  source 1..25: mol_type = genomic DNA
ctctggtattatgtcttaacatttt

SEQ ID NO: 480 - DNA, 25 bp, Homo sapiens
  source 1..25: mol_type = genomic DNA
tctggtattatgtcttaacattttt

SEQ ID NO: 481 - DNA, 25 bp, Homo sapiens
  source 1..25: mol_type = genomic DNA
ctggtattatgtcttaacattttta

SEQ ID NO: 482 - DNA, 25 bp, Homo sapiens
  source 1..25: mol_type = genomic DNA
tggtattatgtcttaacatttttaa

SEQ ID NO: 483 - DNA, 25 bp, Homo sapiens
  source 1..25: mol_type = genomic DNA
ggtattatgtcttaacatttttaaa

SEQ ID NO: 484 - DNA, 25 bp, Homo sapiens
  source 1..25: mol_type = genomic DNA
gtattatgtcttaacatttttaaat

SEQ ID NO: 485 - DNA, 25 bp, Homo sapiens
  source 1..25: mol_type = genomic DNA
tattatgtcttaacatttttaaatc

SEQ ID NO: 486 - DNA, 25 bp, Homo sapiens
  source 1..25: mol_type = genomic DNA
attatgtcttaacatttttaaatct

SEQ ID NO: 487 - DNA, 25 bp, Homo sapiens
  source 1..25: mol_type = genomic DNA
ttatgtcttaacatttttaaatcta

SEQ ID NO: 488 - DNA, 25 bp, Homo sapiens
  source 1..25: mol_type = genomic DNA
tatgtcttaacatttttaaatctat

SEQ ID NO: 489 - DNA, 25 bp, Homo sapiens
  source 1..25: mol_type = genomic DNA
atgtcttaacatttttaaatctatg

SEQ ID NO: 490 - DNA, 25 bp, Homo sapiens
  source 1..25: mol_type = genomic DNA
tgtcttaacatttttaaatctatgg

SEQ ID NO: 491 - DNA, 25 bp, Homo sapiens
  source 1..25: mol_type = genomic DNA
gtcttaacatttttaaatctatggt

SEQ ID NO: 492 - DNA, 25 bp, Homo sapiens
  source 1..25: mol_type = genomic DNA
tcttaacatttttaaatctatggta

SEQ ID NO: 493 - DNA, 25 bp, Homo sapiens
  source 1..25: mol_type = genomic DNA
cttaacatttttaaatctatggtaa

SEQ ID NO: 494 - DNA, 25 bp, Homo sapiens
  source 1..25: mol_type = genomic DNA
ttaacatttttaaatctatggtaat

SEQ ID NO: 495 - DNA, 25 bp, Homo sapiens
  source 1..25: mol_type = genomic DNA
taacatttttaaatctatggtaatc

SEQ ID NO: 496 - DNA, 25 bp, Homo sapiens
  source 1..25: mol_type = genomic DNA
aacatttttaaatctatggtaatct

SEQ ID NO: 497 - DNA, 25 bp, Homo sapiens
  source 1..25: mol_type = genomic DNA
acatttttaaatctatggtaatctt

SEQ ID NO: 498 - DNA, 25 bp, Homo sapiens
  source 1..25: mol_type = genomic DNA
catttttaaatctatggtaatcttt

SEQ ID NO: 499 - DNA, 25 bp, Homo sapiens
  source 1..25: mol_type = genomic DNA
atttttaaatctatggtaatcttta

SEQ ID NO: 500 - DNA, 25 bp, Homo sapiens
  source 1..25: mol_type = genomic DNA
tttttaaatctatggtaatctttac

SEQ ID NO: 501 - DNA, 25 bp, Homo sapiens
  source 1..25: mol_type = genomic DNA
ttttaaatctatggtaatctttaca

SEQ ID NO: 502 - DNA, 25 bp, Homo sapiens
  source 1..25: mol_type = genomic DNA
tttaaatctatggtaatctttacaa

SEQ ID NO: 503 - DNA, 25 bp, Homo sapiens
  source 1..25: mol_type = genomic DNA
ttaaatctatggtaatctttacaaa

SEQ ID NO: 504 - DNA, 25 bp, Homo sapiens
  source 1..25: mol_type = genomic DNA
taaatctatggtaatctttacaaaa

SEQ ID NO: 505 - DNA, 25 bp, Homo sapiens
  source 1..25: mol_type = genomic DNA
aaatctatggtaatctttacaaaat

SEQ ID NO: 506 - DNA, 25 bp, Homo sapiens
  source 1..25: mol_type = genomic DNA
aatctatggtaatctttacaaaata

SEQ ID NO: 507 - DNA, 25 bp, Homo sapiens
  source 1..25: mol_type = genomic DNA
atctatggtaatctttacaaaatat

SEQ ID NO: 508 - DNA, 25 bp, Homo sapiens
  source 1..25: mol_type = genomic DNA
tctatggtaatctttacaaaatatt

SEQ ID NO: 509 - DNA, 25 bp, Homo sapiens
  source 1..25: mol_type = genomic DNA
ctatggtaatctttacaaaatattt

SEQ ID NO: 510 - DNA, 25 bp, Homo sapiens
  source 1..25: mol_type = genomic DNA
tatggtaatctttacaaaatatttt

SEQ ID NO: 511 - DNA, 25 bp, Homo sapiens
  source 1..25: mol_type = genomic DNA
atggtaatctttacaaaatatttta

SEQ ID NO: 512 - DNA, 25 bp, Homo sapiens
  source 1..25: mol_type = genomic DNA
tggtaatctttacaaaatattttac

SEQ ID NO: 513 - DNA, 25 bp, Homo sapiens
  source 1..25: mol_type = genomic DNA
ggtaatctttacaaaatattttact

SEQ ID NO: 514 - DNA, 25 bp, Homo sapiens
  source 1..25: mol_type = genomic DNA
gtaatctttacaaaatattttactt

SEQ ID NO: 515 - DNA, 25 bp, Homo sapiens
  source 1..25: mol_type = genomic DNA
taatctttacaaaatattttacttc

SEQ ID NO: 516 - DNA, 25 bp, Homo sapiens
  source 1..25: mol_type = genomic DNA
aatctttacaaaatattttacttcc

SEQ ID NO: 517 - DNA, 25 bp, Homo sapiens
  source 1..25: mol_type = genomic DNA
atctttacaaaatattttacttccg

SEQ ID NO: 518 - DNA, 25 bp, Homo sapiens
  source 1..25: mol_type = genomic DNA
tctttacaaaatattttacttccga

SEQ ID NO: 519 - DNA, 25 bp, Homo sapiens
  source 1..25: mol_type = genomic DNA
ctttacaaaatattttacttccgaa

SEQ ID NO: 520 - DNA, 25 bp, Homo sapiens
  source 1..25: mol_type = genomic DNA
tttacaaaatattttacttccgaac

SEQ ID NO: 521 - DNA, 25 bp, Homo sapiens
  source 1..25: mol_type = genomic DNA
ttacaaaatattttacttccgaact

SEQ ID NO: 522 - DNA, 25 bp, Homo sapiens
  source 1..25: mol_type = genomic DNA
tacaaaatattttacttccgaactc

SEQ ID NO: 523 - DNA, 25 bp, Homo sapiens
  source 1..25: mol_type = genomic DNA
acaaaatattttacttccgaactca

SEQ ID NO: 524 - DNA, 25 bp, Homo sapiens
  source 1..25: mol_type = genomic DNA
caaaatattttacttccgaactcat

SEQ ID NO: 525 - DNA, 25 bp, Homo sapiens
  source 1..25: mol_type = genomic DNA
aaaatattttacttccgaactcata

SEQ ID NO: 526 - DNA, 25 bp, Homo sapiens
  source 1..25: mol_type = genomic DNA
aaatattttacttccgaactcatat

SEQ ID NO: 527 - DNA, 25 bp, Homo sapiens
  source 1..25: mol_type = genomic DNA
aatattttacttccgaactcatata

SEQ ID NO: 528 - DNA, 25 bp, Homo sapiens
  source 1..25: mol_type = genomic DNA
atattttacttccgaactcatatac

SEQ ID NO: 529 - DNA, 25 bp, Homo sapiens
  source 1..25: mol_type = genomic DNA
tattttacttccgaactcatatacc

SEQ ID NO: 530 - DNA, 25 bp, Homo sapiens
  source 1..25: mol_type = genomic DNA
attttacttccgaactcatatacct

SEQ ID NO: 531 - DNA, 25 bp, Homo sapiens
  source 1..25: mol_type = genomic DNA
ttttacttccgaactcatatacctg

SEQ ID NO: 532 - DNA, 25 bp, Homo sapiens
  source 1..25: mol_type = genomic DNA
tttacttccgaactcatatacctgg

SEQ ID NO: 533 - DNA, 25 bp, Homo sapiens
  source 1..25: mol_type = genomic DNA
ttacttccgaactcatatacctggg

SEQ ID NO: 534 - DNA, 25 bp, Homo sapiens
  source 1..25: mol_type = genomic DNA
tacttccgaactcatatacctgggg

SEQ ID NO: 535 - DNA, 25 bp, Homo sapiens
  source 1..25: mol_type = genomic DNA
acttccgaactcatatacctgggga

SEQ ID NO: 536 - DNA, 25 bp, Homo sapiens
  source 1..25: mol_type = genomic DNA
cttccgaactcatatacctggggat

SEQ ID NO: 537 - DNA, 25 bp, Homo sapiens
  source 1..25: mol_type = genomic DNA
ttccgaactcatatacctggggatt

SEQ ID NO: 538 - DNA, 25 bp, Homo sapiens
  source 1..25: mol_type = genomic DNA
tccgaactcatatacctggggattt

SEQ ID NO: 539 - DNA, 25 bp, Homo sapiens
  source 1..25: mol_type = genomic DNA
ccgaactcatatacctggggatttt

SEQ ID NO: 540 - DNA, 25 bp, Homo sapiens
  source 1..25: mol_type = genomic DNA
cgaactcatatacctggggatttta

SEQ ID NO: 541 - DNA, 25 bp, Homo sapiens
  source 1..25: mol_type = genomic DNA
gaactcatatacctggggattttat

SEQ ID NO: 542 - DNA, 25 bp, Homo sapiens
  source 1..25: mol_type = genomic DNA
aactcatatacctggggattttatt

SEQ ID NO: 543 - DNA, 25 bp, Homo sapiens
  source 1..25: mol_type = genomic DNA
actcatatacctggggattttatta

SEQ ID NO: 544 - DNA, 25 bp, Homo sapiens
  source 1..25: mol_type = genomic DNA
ctcatatacctggggattttattac

SEQ ID NO: 545 - DNA, 25 bp, Homo sapiens
  source 1..25: mol_type = genomic DNA
tcatatacctggggattttattact

SEQ ID NO: 546 - DNA, 25 bp, Homo sapiens
  source 1..25: mol_type = genomic DNA
catatacctggggattttattactc

SEQ ID NO: 547 - DNA, 25 bp, Homo sapiens
  source 1..25: mol_type = genomic DNA
atatacctggggattttattactct

SEQ ID NO: 548 - DNA, 25 bp, Homo sapiens
  source 1..25: mol_type = genomic DNA
tatacctggggattttattactctg

SEQ ID NO: 549 - DNA, 25 bp, Homo sapiens
  source 1..25: mol_type = genomic DNA
atacctggggattttattactctgg

SEQ ID NO: 550 - DNA, 25 bp, Homo sapiens
  source 1..25: mol_type = genomic DNA
tacctggggattttattactctggg

SEQ ID NO: 551 - DNA, 25 bp, Homo sapiens
  source 1..25: mol_type = genomic DNA
acctggggattttattactctggga

SEQ ID NO: 552 - DNA, 25 bp, Homo sapiens
  source 1..25: mol_type = genomic DNA
cctggggattttattactctgggaa

SEQ ID NO: 553 - DNA, 25 bp, Homo sapiens
  source 1..25: mol_type = genomic DNA
ctggggattttattactctgggaat

SEQ ID NO: 554 - DNA, 25 bp, Homo sapiens
  source 1..25: mol_type = genomic DNA
tggggattttattactctgggaatt

SEQ ID NO: 555 - DNA, 25 bp, Homo sapiens
  source 1..25: mol_type = genomic DNA
ggggattttattactctgggaatta

SEQ ID NO: 556 - DNA, 25 bp, Homo sapiens
  source 1..25: mol_type = genomic DNA
gggattttattactctgggaattat

SEQ ID NO: 557 - DNA, 25 bp, Homo sapiens
  source 1..25: mol_type = genomic DNA
ggattttattactctgggaattatg

SEQ ID NO: 558 - DNA, 25 bp, Homo sapiens
  source 1..25: mol_type = genomic DNA
gattttattactctgggaattatgt

SEQ ID NO: 559 - DNA, 25 bp, Homo sapiens
  source 1..25: mol_type = genomic DNA
attttattactctgggaattatgtg

SEQ ID NO: 560 - DNA, 25 bp, Homo sapiens
  source 1..25: mol_type = genomic DNA
ttttattactctgggaattatgtgt

SEQ ID NO: 561 - DNA, 25 bp, Homo sapiens
  source 1..25: mol_type = genomic DNA
tttattactctgggaattatgtgtt

SEQ ID NO: 562 - DNA, 25 bp, Homo sapiens
  source 1..25: mol_type = genomic DNA
ttattactctgggaattatgtgttc

SEQ ID NO: 563 - DNA, 25 bp, Homo sapiens
  source 1..25: mol_type = genomic DNA
tattactctgggaattatgtgttct

SEQ ID NO: 564 - DNA, 25 bp, Homo sapiens
  source 1..25: mol_type = genomic DNA
attactctgggaattatgtgttctg

SEQ ID NO: 565 - DNA, 25 bp, Homo sapiens
  source 1..25: mol_type = genomic DNA
ttactctgggaattatgtgttctgc

SEQ ID NO: 566 - DNA, 25 bp, Homo sapiens
  source 1..25: mol_type = genomic DNA
tactctgggaattatgtgttctgcc

SEQ ID NO: 567 - DNA, 25 bp, Homo sapiens
  source 1..25: mol_type = genomic DNA
actctgggaattatgtgttctgccc

SEQ ID NO: 568 - DNA, 25 bp, Homo sapiens
  source 1..25: mol_type = genomic DNA
ctctgggaattatgtgttctgcccc

SEQ ID NO: 569 - DNA, 25 bp, Homo sapiens
  source 1..25: mol_type = genomic DNA
tctgggaattatgtgttctgcccca

SEQ ID NO: 570 - DNA, 25 bp, Homo sapiens
  source 1..25: mol_type = genomic DNA
ctgggaattatgtgttctgccccat

SEQ ID NO: 571 - DNA, 25 bp, Homo sapiens
  source 1..25: mol_type = genomic DNA
tgggaattatgtgttctgccccatc

SEQ ID NO: 572 - DNA, 25 bp, Homo sapiens
  source 1..25: mol_type = genomic DNA
gggaattatgtgttctgccccatca

SEQ ID NO: 573 - DNA, 25 bp, Homo sapiens
  source 1..25: mol_type = genomic DNA
ggaattatgtgttctgccccatcac

SEQ ID NO: 574 - DNA, 25 bp, Homo sapiens
  source 1..25: mol_type = genomic DNA
gaattatgtgttctgccccatcact

SEQ ID NO: 575 - DNA, 25 bp, Homo sapiens
  source 1..25: mol_type = genomic DNA
aattatgtgttctgccccatcactc

SEQ ID NO: 576 - DNA, 25 bp, Homo sapiens
  source 1..25: mol_type = genomic DNA
attatgtgttctgccccatcactct

SEQ ID NO: 577 - DNA, 25 bp, Homo sapiens
  source 1..25: mol_type = genomic DNA
ttatgtgttctgccccatcactctc

SEQ ID NO: 578 - DNA, 25 bp, Homo sapiens
  source 1..25: mol_type = genomic DNA
tatgtgttctgccccatcactctct

SEQ ID NO: 579 - DNA, 25 bp, Homo sapiens
  source 1..25: mol_type = genomic DNA
atgtgttctgccccatcactctctc

SEQ ID NO: 580 - DNA, 25 bp, Homo sapiens
  source 1..25: mol_type = genomic DNA
tgtgttctgccccatcactctctct

SEQ ID NO: 581 - DNA, 25 bp, Homo sapiens
  source 1..25: mol_type = genomic DNA
gtgttctgccccatcactctctctt

SEQ ID NO: 582 - DNA, 25 bp, Homo sapiens
  source 1..25: mol_type = genomic DNA
tgttctgccccatcactctctctta

SEQ ID NO: 583 - DNA, 25 bp, Homo sapiens
  source 1..25: mol_type = genomic DNA
gttctgccccatcactctctcttaa

SEQ ID NO: 584 - DNA, 25 bp, Homo sapiens
  source 1..25: mol_type = genomic DNA
ttctgccccatcactctctcttaat

SEQ ID NO: 585 - DNA, 25 bp, Homo sapiens
  source 1..25: mol_type = genomic DNA
tctgccccatcactctctcttaatt

SEQ ID NO: 586 - DNA, 25 bp, Homo sapiens
  source 1..25: mol_type = genomic DNA
ctgccccatcactctctcttaattg

SEQ ID NO: 587 - DNA, 25 bp, Homo sapiens
  source 1..25: mol_type = genomic DNA
tgccccatcactctctcttaattgg

SEQ ID NO: 588 - DNA, 25 bp, Homo sapiens
  source 1..25: mol_type = genomic DNA
gccccatcactctctcttaattgga

SEQ ID NO: 589 - DNA, 25 bp, Homo sapiens
  source 1..25: mol_type = genomic DNA
ccccatcactctctcttaattggat

SEQ ID NO: 590 - DNA, 25 bp, Homo sapiens
  source 1..25: mol_type = genomic DNA
cccatcactctctcttaattggatt

SEQ ID NO: 591 - DNA, 25 bp, Homo sapiens
  source 1..25: mol_type = genomic DNA
ccatcactctctcttaattggattt

SEQ ID NO: 592 - DNA, 25 bp, Homo sapiens
  source 1..25: mol_type = genomic DNA
catcactctctcttaattggatttt

SEQ ID NO: 593 - DNA, 25 bp, Homo sapiens
  source 1..25: mol_type = genomic DNA
atcactctctcttaattggattttt

SEQ ID NO: 594 - DNA, 25 bp, Homo sapiens
  source 1..25: mol_type = genomic DNA
tcactctctcttaattggattttta

SEQ ID NO: 595 - DNA, 25 bp, Homo sapiens
  source 1..25: mol_type = genomic DNA
cactctctcttaattggatttttaa

SEQ ID NO: 596 - DNA, 25 bp, Homo sapiens
  source 1..25: mol_type = genomic DNA
actctctcttaattggatttttaaa

SEQ ID NO: 597 - DNA, 25 bp, Homo sapiens
  source 1..25: mol_type = genomic DNA
ctctctcttaattggatttttaaaa

SEQ ID NO: 598 - DNA, 25 bp, Homo sapiens
  source 1..25: mol_type = genomic DNA
tctctcttaattggatttttaaaat

SEQ ID NO: 599 - DNA, 25 bp, Homo sapiens
  source 1..25: mol_type = genomic DNA
ctctcttaattggatttttaaaatt

SEQ ID NO: 600 - DNA, 25 bp, Homo sapiens
  source 1..25: mol_type = genomic DNA
tctcttaattggatttttaaaatta

SEQ ID NO: 601 - DNA, 25 bp, Homo sapiens
  source 1..25: mol_type = genomic DNA
ctcttaattggatttttaaaattat

SEQ ID NO: 602 - DNA, 25 bp, Homo sapiens
  source 1..25: mol_type = genomic DNA
tcttaattggatttttaaaattata

SEQ ID NO: 603 - DNA, 25 bp, Homo sapiens
  source 1..25: mol_type = genomic DNA
cttaattggatttttaaaattatat

SEQ ID NO: 604 - DNA, 25 bp, Homo sapiens
  source 1..25: mol_type = genomic DNA
ttaattggatttttaaaattatatt

SEQ ID NO: 605 - DNA, 25 bp, Homo sapiens
  source 1..25: mol_type = genomic DNA
taattggatttttaaaattatattc

SEQ ID NO: 606 - DNA, 25 bp, Homo sapiens
  source 1..25: mol_type = genomic DNA
aattggatttttaaaattatattca

SEQ ID NO: 607 - DNA, 25 bp, Homo sapiens
  source 1..25: mol_type = genomic DNA
attggatttttaaaattatattcat

SEQ ID NO: 608 - DNA, 25 bp, Homo sapiens
  source 1..25: mol_type = genomic DNA
ttggatttttaaaattatattcata

SEQ ID NO: 609 - DNA, 25 bp, Homo sapiens
  source 1..25: mol_type = genomic DNA
tggatttttaaaattatattcatat

SEQ ID NO: 610 - DNA, 25 bp, Homo sapiens
  source 1..25: mol_type = genomic DNA
ggatttttaaaattatattcatatt

SEQ ID NO: 611 - DNA, 25 bp, Homo sapiens
  source 1..25: mol_type = genomic DNA
gatttttaaaattatattcatattg

SEQ ID NO: 612 - DNA, 25 bp, Homo sapiens
  source 1..25: mol_type = genomic DNA
atttttaaaattatattcatattgc

SEQ ID NO: 613 - DNA, 25 bp, Homo sapiens
  source 1..25: mol_type = genomic DNA
tttttaaaattatattcatattgca

SEQ ID NO: 614 - DNA, 25 bp, Homo sapiens
  source 1..25: mol_type = genomic DNA
ttttaaaattatattcatattgcag

SEQ ID NO: 615 - DNA, 25 bp, Homo sapiens
  source 1..25: mol_type = genomic DNA
tttaaaattatattcatattgcagg

SEQ ID NO: 616 - DNA, 25 bp, Homo sapiens
  source 1..25: mol_type = genomic DNA
ttaaaattatattcatattgcagga

SEQ ID NO: 617 - DNA, 25 bp, Homo sapiens
  source 1..25: mol_type = genomic DNA
taaaattatattcatattgcaggac

SEQ ID NO: 618 - DNA, 25 bp, Homo sapiens
  source 1..25: mol_type = genomic DNA
aaaattatattcatattgcaggact

SEQ ID NO: 619 - DNA, 25 bp, Homo sapiens
  source 1..25: mol_type = genomic DNA
aaattatattcatattgcaggactc

SEQ ID NO: 620 - DNA, 25 bp, Homo sapiens
  source 1..25: mol_type = genomic DNA
aattatattcatattgcaggactcg

SEQ ID NO: 621 - DNA, 25 bp, Homo sapiens
  source 1..25: mol_type = genomic DNA
attatattcatattgcaggactcgg

SEQ ID NO: 622 - DNA, 25 bp, Homo sapiens
  source 1..25: mol_type = genomic DNA
ttatattcatattgcaggactcggc

SEQ ID NO: 623 - DNA, 25 bp, Homo sapiens
  source 1..25: mol_type = genomic DNA
tatattcatattgcaggactcggca

SEQ ID NO: 624 - DNA, 25 bp, Homo sapiens
  source 1..25: mol_type = genomic DNA
atattcatattgcaggactcggcag

SEQ ID NO: 625 - DNA, 25 bp, Homo sapiens
  source 1..25: mol_type = genomic DNA
tattcatattgcaggactcggcaga

SEQ ID NO: 626 - DNA, 25 bp, Homo sapiens
  source 1..25: mol_type = genomic DNA
attcatattgcaggactcggcagaa

SEQ ID NO: 627 - DNA, 25 bp, Homo sapiens
  source 1..25: mol_type = genomic DNA
ttcatattgcaggactcggcagaag

SEQ ID NO: 628 - DNA, 25 bp, Homo sapiens
  source 1..25: mol_type = genomic DNA
tcatattgcaggactcggcagaaga

SEQ ID NO: 629 - DNA, 25 bp, Homo sapiens
  source 1..25: mol_type = genomic DNA
catattgcaggactcggcagaagac

SEQ ID NO: 630 - DNA, 25 bp, Homo sapiens
  source 1..25: mol_type = genomic DNA
atattgcaggactcggcagaagacc

SEQ ID NO: 631 - DNA, 25 bp, Homo sapiens
  source 1..25: mol_type = genomic DNA
tattgcaggactcggcagaagacct

SEQ ID NO: 632 - DNA, 25 bp, Homo sapiens
  source 1..25: mol_type = genomic DNA
attgcaggactcggcagaagacctt

SEQ ID NO: 633 - DNA, 25 bp, Homo sapiens
  source 1..25: mol_type = genomic DNA
ttgcaggactcggcagaagaccttc

SEQ ID NO: 634 - DNA, 25 bp, Homo sapiens
  source 1..25: mol_type = genomic DNA
tgcaggactcggcagaagaccttcg

SEQ ID NO: 635 - DNA, 25 bp, Homo sapiens
  source 1..25: mol_type = genomic DNA
gcaggactcggcagaagaccttcga

SEQ ID NO: 636 - DNA, 25 bp, Homo sapiens
  source 1..25: mol_type = genomic DNA
caggactcggcagaagaccttcgag

SEQ ID NO: 637 - DNA, 25 bp, Homo sapiens
  source 1..25: mol_type = genomic DNA
aggactcggcagaagaccttcgaga

SEQ ID NO: 638 - DNA, 25 bp, Homo sapiens
  source 1..25: mol_type = genomic DNA
ggactcggcagaagaccttcgagag

SEQ ID NO: 639 - DNA, 25 bp, Homo sapiens
  source 1..25: mol_type = genomic DNA
gactcggcagaagaccttcgagaga

SEQ ID NO: 640 - DNA, 25 bp, Homo sapiens
  source 1..25: mol_type = genomic DNA
actcggcagaagaccttcgagagaa

SEQ ID NO: 641 - DNA, 25 bp, Homo sapiens
  source 1..25: mol_type = genomic DNA
ctcggcagaagaccttcgagagaaa

SEQ ID NO: 642 - DNA, 25 bp, Homo sapiens
  source 1..25: mol_type = genomic DNA
tcggcagaagaccttcgagagaaag

SEQ ID NO: 643 - DNA, 25 bp, Homo sapiens
  source 1..25: mol_type = genomic DNA
cggcagaagaccttcgagagaaagg

SEQ ID NO: 644 - DNA, 25 bp, Homo sapiens
  source 1..25: mol_type = genomic DNA
ggcagaagaccttcgagagaaaggt

SEQ ID NO: 645 - DNA, 25 bp, Homo sapiens
  source 1..25: mol_type = genomic DNA
gcagaagaccttcgagagaaaggta

SEQ ID NO: 646 - DNA, 25 bp, Homo sapiens
  source 1..25: mol_type = genomic DNA
cagaagaccttcgagagaaaggtag

SEQ ID NO: 647 - DNA, 25 bp, Homo sapiens
  source 1..25: mol_type = genomic DNA
agaagaccttcgagagaaaggtaga

SEQ ID NO: 648 - DNA, 25 bp, Homo sapiens
  source 1..25: mol_type = genomic DNA
gaagaccttcgagagaaaggtagaa

SEQ ID NO: 649 - DNA, 25 bp, Homo sapiens
  source 1..25: mol_type = genomic DNA
aagaccttcgagagaaaggtagaaa

SEQ ID NO: 650 - DNA, 25 bp, Homo sapiens
  source 1..25: mol_type = genomic DNA
agaccttcgagagaaaggtagaaaa

SEQ ID NO: 651 - DNA, 25 bp, Homo sapiens
  source 1..25: mol_type = genomic DNA
gaccttcgagagaaaggtagaaaat

SEQ ID NO: 652 - DNA, 25 bp, Homo sapiens
  source 1..25: mol_type = genomic DNA
accttcgagagaaaggtagaaaata

SEQ ID NO: 653 - DNA, 25 bp, Homo sapiens
  source 1..25: mol_type = genomic DNA
ccttcgagagaaaggtagaaaataa

SEQ ID NO: 654 - DNA, 25 bp, Homo sapiens
  source 1..25: mol_type = genomic DNA
cttcgagagaaaggtagaaaataag

SEQ ID NO: 655 - DNA, 25 bp, Homo sapiens
  source 1..25: mol_type = genomic DNA
ttcgagagaaaggtagaaaataaga

SEQ ID NO: 656 - DNA, 25 bp, Homo sapiens
  source 1..25: mol_type = genomic DNA
tcgagagaaaggtagaaaataagaa

SEQ ID NO: 657 - DNA, 25 bp, Homo sapiens
  source 1..25: mol_type = genomic DNA
cgagagaaaggtagaaaataagaat

SEQ ID NO: 658 - DNA, 25 bp, Homo sapiens
  source 1..25: mol_type = genomic DNA
gagagaaaggtagaaaataagaatt

SEQ ID NO: 659 - DNA, 25 bp, Homo sapiens
  source 1..25: mol_type = genomic DNA
agagaaaggtagaaaataagaattt

SEQ ID NO: 660 - DNA, 25 bp, Homo sapiens
  source 1..25: mol_type = genomic DNA
gagaaaggtagaaaataagaatttg

SEQ ID NO: 661 - DNA, 25 bp, Homo sapiens
  source 1..25: mol_type = genomic DNA
agaaaggtagaaaataagaatttgg

SEQ ID NO: 662 - DNA, 25 bp, Homo sapiens
  source 1..25: mol_type = genomic DNA
gaaaggtagaaaataagaatttggc

SEQ ID NO: 663 - DNA, 25 bp, Homo sapiens
  source 1..25: mol_type = genomic DNA
aaaggtagaaaataagaatttggct

SEQ ID NO: 664 - DNA, 25 bp, Homo sapiens
  source 1..25: mol_type = genomic DNA
aaggtagaaaataagaatttggctc

SEQ ID NO: 665 - DNA, 25 bp, Homo sapiens
  source 1..25: mol_type = genomic DNA
aggtagaaaataagaatttggctct

SEQ ID NO: 666 - DNA, 25 bp, Homo sapiens
  source 1..25: mol_type = genomic DNA
ggtagaaaataagaatttggctctc

SEQ ID NO: 667 - DNA, 25 bp, Homo sapiens
  source 1..25: mol_type = genomic DNA
gtagaaaataagaatttggctctct

SEQ ID NO: 668 - DNA, 25 bp, Homo sapiens
  source 1..25: mol_type = genomic DNA
tagaaaataagaatttggctctctg

SEQ ID NO: 669 - DNA, 25 bp, Homo sapiens
  source 1..25: mol_type = genomic DNA
agaaaataagaatttggctctctgt

SEQ ID NO: 670 - DNA, 25 bp, Homo sapiens
  source 1..25: mol_type = genomic DNA
gaaaataagaatttggctctctgtg

SEQ ID NO: 671 - DNA, 25 bp, Homo sapiens
  source 1..25: mol_type = genomic DNA
aaaataagaatttggctctctgtgt

SEQ ID NO: 672 - DNA, 25 bp, Homo sapiens
  source 1..25: mol_type = genomic DNA
aaataagaatttggctctctgtgtg

SEQ ID NO: 673 - DNA, 25 bp, Homo sapiens
  source 1..25: mol_type = genomic DNA
aataagaatttggctctctgtgtga

SEQ ID NO: 674 - DNA, 25 bp, Homo sapiens
  source 1..25: mol_type = genomic DNA
ataagaatttggctctctgtgtgag

SEQ ID NO: 675 - DNA, 25 bp, Homo sapiens
  source 1..25: mol_type = genomic DNA
taagaatttggctctctgtgtgagc

SEQ ID NO: 676 - DNA, 25 bp, Homo sapiens
  source 1..25: mol_type = genomic DNA
aagaatttggctctctgtgtgagca

SEQ ID NO: 677 - DNA, 25 bp, Homo sapiens
  source 1..25: mol_type = genomic DNA
agaatttggctctctgtgtgagcat

SEQ ID NO: 678 - DNA, 25 bp, Homo sapiens
  source 1..25: mol_type = genomic DNA
gaatttggctctctgtgtgagcatg

SEQ ID NO: 679 - DNA, 25 bp, Homo sapiens
  source 1..25: mol_type = genomic DNA
aatttggctctctgtgtgagcatgt

SEQ ID NO: 680 - DNA, 25 bp, Homo sapiens
  source 1..25: mol_type = genomic DNA
atttggctctctgtgtgagcatgtg

SEQ ID NO: 681 - DNA, 25 bp, Homo sapiens
  source 1..25: mol_type = genomic DNA
tttggctctctgtgtgagcatgtgt

SEQ ID NO: 682 - DNA, 25 bp, Homo sapiens
  source 1..25: mol_type = genomic DNA
ttggctctctgtgtgagcatgtgtg

SEQ ID NO: 683 - DNA, 25 bp, Homo sapiens
  source 1..25: mol_type = genomic DNA
tggctctctgtgtgagcatgtgtgc

SEQ ID NO: 684 - DNA, 25 bp, Homo sapiens
  source 1..25: mol_type = genomic DNA
ggctctctgtgtgagcatgtgtgcg

SEQ ID NO: 685 - DNA, 25 bp, Homo sapiens
  source 1..25: mol_type = genomic DNA
gctctctgtgtgagcatgtgtgcgt

SEQ ID NO: 686 - DNA, 25 bp, Homo sapiens
  source 1..25: mol_type = genomic DNA
ctctctgtgtgagcatgtgtgcgtg

SEQ ID NO: 687 - DNA, 25 bp, Homo sapiens
  source 1..25: mol_type = genomic DNA
tctctgtgtgagcatgtgtgcgtgt

SEQ ID NO: 688 - DNA, 25 bp, Homo sapiens
  source 1..25: mol_type = genomic DNA
ctctgtgtgagcatgtgtgcgtgtg

SEQ ID NO: 689 - DNA, 25 bp, Homo sapiens
  source 1..25: mol_type = genomic DNA
tctgtgtgagcatgtgtgcgtgtgt

SEQ ID NO: 690 - DNA, 25 bp, Homo sapiens
  source 1..25: mol_type = genomic DNA
ctgtgtgagcatgtgtgcgtgtgtg

SEQ ID NO: 691 - DNA, 25 bp, Homo sapiens
  source 1..25: mol_type = genomic DNA
tgtgtgagcatgtgtgcgtgtgtgc

SEQ ID NO: 692 - DNA, 25 bp, Homo sapiens
  source 1..25: mol_type = genomic DNA
gtgtgagcatgtgtgcgtgtgtgcg

SEQ ID NO: 693 - DNA, 25 bp, Homo sapiens
  source 1..25: mol_type = genomic DNA
tgtgagcatgtgtgcgtgtgtgcga

SEQ ID NO: 694 - DNA, 25 bp, Homo sapiens
  source 1..25: mol_type = genomic DNA
gtgagcatgtgtgcgtgtgtgcgag

SEQ ID NO: 695 - DNA, 25 bp, Homo sapiens
  source 1..25: mol_type = genomic DNA
tgagcatgtgtgcgtgtgtgcgaga

SEQ ID NO: 696 - DNA, 25 bp, Homo sapiens
  source 1..25: mol_type = genomic DNA
gagcatgtgtgcgtgtgtgcgagag

SEQ ID NO: 697 - DNA, 25 bp, Homo sapiens
  source 1..25: mol_type = genomic DNA
agcatgtgtgcgtgtgtgcgagaga

SEQ ID NO: 698 - DNA, 25 bp, Homo sapiens
  source 1..25: mol_type = genomic DNA
gcatgtgtgcgtgtgtgcgagagag

SEQ ID NO: 699 - DNA, 25 bp, Homo sapiens
  source 1..25: mol_type = genomic DNA
catgtgtgcgtgtgtgcgagagaga

SEQ ID NO: 700 - DNA, 25 bp, Homo sapiens
  source 1..25: mol_type = genomic DNA
atgtgtgcgtgtgtgcgagagagag

SEQ ID NO: 701 - DNA, 25 bp, Homo sapiens
  source 1..25: mol_type = genomic DNA
tgtgtgcgtgtgtgcgagagagaga

SEQ ID NO: 702 - DNA, 25 bp, Homo sapiens
  source 1..25: mol_type = genomic DNA
gtgtgcgtgtgtgcgagagagagag

SEQ ID NO: 703 - DNA, 25 bp, Homo sapiens
  source 1..25: mol_type = genomic DNA
tgtgcgtgtgtgcgagagagagaga

SEQ ID NO: 704 - DNA, 25 bp, Homo sapiens
  source 1..25: mol_type = genomic DNA
gtgcgtgtgtgcgagagagagagac

SEQ ID NO: 705 - DNA, 25 bp, Homo sapiens
  source 1..25: mol_type = genomic DNA
tgcgtgtgtgcgagagagagagaca

SEQ ID NO: 706 - DNA, 25 bp, Homo sapiens
  source 1..25: mol_type = genomic DNA
gcgtgtgtgcgagagagagagacag

SEQ ID NO: 707 - DNA, 25 bp, Homo sapiens
  source 1..25: mol_type = genomic DNA
cgtgtgtgcgagagagagagacaga

SEQ ID NO: 708 - DNA, 25 bp, Homo sapiens
  source 1..25: mol_type = genomic DNA
gtgtgtgcgagagagagagacagac

SEQ ID NO: 709 - DNA, 25 bp, Homo sapiens
  source 1..25: mol_type = genomic DNA
tgtgtgcgagagagagagacagaca

SEQ ID NO: 710 - DNA, 25 bp, Homo sapiens
  source 1..25: mol_type = genomic DNA
gtgtgcgagagagagagacagacag

SEQ ID NO: 711 - DNA, 25 bp, Homo sapiens
  source 1..25: mol_type = genomic DNA
tgtgcgagagagagagacagacagc

SEQ ID NO: 712 - DNA, 25 bp, Homo sapiens
  source 1..25: mol_type = genomic DNA
gtgcgagagagagagacagacagcc

SEQ ID NO: 713 - DNA, 25 bp, Homo sapiens
  source 1..25: mol_type = genomic DNA
tgcgagagagagagacagacagcct

SEQ ID NO: 714 - DNA, 25 bp, Homo sapiens
  source 1..25: mol_type = genomic DNA
gcgagagagagagacagacagcctg

SEQ ID NO: 715 - DNA, 25 bp, Homo sapiens
  source 1..25: mol_type = genomic DNA
cgagagagagagacagacagcctgc

SEQ ID NO: 716 - DNA, 25 bp, Homo sapiens
  source 1..25: mol_type = genomic DNA
gagagagagagacagacagcctgcc

SEQ ID NO: 717 - DNA, 25 bp, Homo sapiens
  source 1..25: mol_type = genomic DNA
agagagagagacagacagcctgcct

SEQ ID NO: 718 - DNA, 25 bp, Homo sapiens
  source 1..25: mol_type = genomic DNA
gagagagagacagacagcctgccta

SEQ ID NO: 719 - DNA, 25 bp, Homo sapiens
  source 1..25: mol_type = genomic DNA
agagagagacagacagcctgcctaa

SEQ ID NO: 720 - DNA, 25 bp, Homo sapiens
  source 1..25: mol_type = genomic DNA
gagagagacagacagcctgcctaag

SEQ ID NO: 721 - DNA, 25 bp, Homo sapiens
  source 1..25: mol_type = genomic DNA
agagagacagacagcctgcctaaga

SEQ ID NO: 722 - DNA, 25 bp, Homo sapiens
  source 1..25: mol_type = genomic DNA
gagagacagacagcctgcctaagaa

SEQ ID NO: 723 - DNA, 25 bp, Homo sapiens
  source 1..25: mol_type = genomic DNA
agagacagacagcctgcctaagaag

SEQ ID NO: 724 - DNA, 25 bp, Homo sapiens
  source 1..25: mol_type = genomic DNA
gagacagacagcctgcctaagaaga

SEQ ID NO: 725 - DNA, 25 bp, Homo sapiens
  source 1..25: mol_type = genomic DNA
agacagacagcctgcctaagaagaa

SEQ ID NO: 726 - DNA, 25 bp, Homo sapiens
  source 1..25: mol_type = genomic DNA
gacagacagcctgcctaagaagaaa

SEQ ID NO: 727 - DNA, 25 bp, Homo sapiens
  source 1..25: mol_type = genomic DNA
acagacagcctgcctaagaagaaat

SEQ ID NO: 728 - DNA, 25 bp, Homo sapiens
  source 1..25: mol_type = genomic DNA
cagacagcctgcctaagaagaaatg

SEQ ID NO: 729 - DNA, 25 bp, Homo sapiens
  source 1..25: mol_type = genomic DNA
agacagcctgcctaagaagaaatga

SEQ ID NO: 730 - DNA, 25 bp, Homo sapiens
  source 1..25: mol_type = genomic DNA
gacagcctgcctaagaagaaatgaa

SEQ ID NO: 731 - DNA, 25 bp, Homo sapiens
  source 1..25: mol_type = genomic DNA
acagcctgcctaagaagaaatgaat

SEQ ID NO: 732 - DNA, 25 bp, Homo sapiens
  source 1..25: mol_type = genomic DNA
cagcctgcctaagaagaaatgaatg

SEQ ID NO: 733 - DNA, 25 bp, Homo sapiens
  source 1..25: mol_type = genomic DNA
agcctgcctaagaagaaatgaatgt

SEQ ID NO: 734 - DNA, 25 bp, Homo sapiens
  source 1..25: mol_type = genomic DNA
gcctgcctaagaagaaatgaatgtg

SEQ ID NO: 735 - DNA, 25 bp, Homo sapiens
  source 1..25: mol_type = genomic DNA
cctgcctaagaagaaatgaatgtga

SEQ ID NO: 736 - DNA, 25 bp, Homo sapiens
  source 1..25: mol_type = genomic DNA
ctgcctaagaagaaatgaatgtgaa

SEQ ID NO: 737 - DNA, 25 bp, Homo sapiens
  source 1..25: mol_type = genomic DNA
tgcctaagaagaaatgaatgtgaat

SEQ ID NO: 738 - DNA, 25 bp, Homo sapiens
  source 1..25: mol_type = genomic DNA
gcctaagaagaaatgaatgtgaatg

SEQ ID NO: 739 - DNA, 25 bp, Homo sapiens
  source 1..25: mol_type = genomic DNA
cctaagaagaaatgaatgtgaatgc

SEQ ID NO: 740 - DNA, 25 bp, Homo sapiens
  source 1..25: mol_type = genomic DNA
ctaagaagaaatgaatgtgaatgcg

SEQ ID NO: 741 - DNA, 25 bp, Homo sapiens
  source 1..25: mol_type = genomic DNA
taagaagaaatgaatgtgaatgcgg

SEQ ID NO: 742 - DNA, 25 bp, Homo sapiens
  source 1..25: mol_type = genomic DNA
aagaagaaatgaatgtgaatgcggc

SEQ ID NO: 743 - DNA, 25 bp, Homo sapiens
  source 1..25: mol_type = genomic DNA
agaagaaatgaatgtgaatgcggct

SEQ ID NO: 744 - DNA, 25 bp, Homo sapiens
  source 1..25: mol_type = genomic DNA
gaagaaatgaatgtgaatgcggctt

SEQ ID NO: 745 - DNA, 25 bp, Homo sapiens
  source 1..25: mol_type = genomic DNA
aagaaatgaatgtgaatgcggcttg

SEQ ID NO: 746 - DNA, 25 bp, Homo sapiens
  source 1..25: mol_type = genomic DNA
agaaatgaatgtgaatgcggcttgt

SEQ ID NO: 747 - DNA, 25 bp, Homo sapiens
  source 1..25: mol_type = genomic DNA
gaaatgaatgtgaatgcggcttgtg

SEQ ID NO: 748 - DNA, 25 bp, Homo sapiens
  source 1..25: mol_type = genomic DNA
aaatgaatgtgaatgcggcttgtgg

SEQ ID NO: 749 - DNA, 25 bp, Homo sapiens
  source 1..25: mol_type = genomic DNA
aatgaatgtgaatgcggcttgtggc

SEQ ID NO: 750 - DNA, 25 bp, Homo sapiens
  source 1..25: mol_type = genomic DNA
atgaatgtgaatgcggcttgtggca

SEQ ID NO: 751 - DNA, 25 bp, Homo sapiens
  source 1..25: mol_type = genomic DNA
tgaatgtgaatgcggcttgtggcac

SEQ ID NO: 752 - DNA, 25 bp, Homo sapiens
  source 1..25: mol_type = genomic DNA
gaatgtgaatgcggcttgtggcaca

SEQ ID NO: 753 - DNA, 25 bp, Homo sapiens
  source 1..25: mol_type = genomic DNA
aatgtgaatgcggcttgtggcacag

SEQ ID NO: 754 - DNA, 25 bp, Homo sapiens
  source 1..25: mol_type = genomic DNA
atgtgaatgcggcttgtggcacagt

SEQ ID NO: 755 - DNA, 25 bp, Homo sapiens
  source 1..25: mol_type = genomic DNA
tgtgaatgcggcttgtggcacagtt

SEQ ID NO: 756 - DNA, 25 bp, Homo sapiens
  source 1..25: mol_type = genomic DNA
gtgaatgcggcttgtggcacagttg

SEQ ID NO: 757 - DNA, 25 bp, Homo sapiens
  source 1..25: mol_type = genomic DNA
tgaatgcggcttgtggcacagttga

SEQ ID NO: 758 - DNA, 25 bp, Homo sapiens
  source 1..25: mol_type = genomic DNA
gaatgcggcttgtggcacagttgac

SEQ ID NO: 759 - DNA, 25 bp, Homo sapiens
  source 1..25: mol_type = genomic DNA
aatgcggcttgtggcacagttgaca

SEQ ID NO: 760 - DNA, 25 bp, Homo sapiens
  source 1..25: mol_type = genomic DNA
atgcggcttgtggcacagttgacaa

SEQ ID NO: 761 - DNA, 25 bp, Homo sapiens
  source 1..25: mol_type = genomic DNA
tgcggcttgtggcacagttgacaag

SEQ ID NO: 762 - DNA, 25 bp, Homo sapiens
  source 1..25: mol_type = genomic DNA
gcggcttgtggcacagttgacaagg

SEQ ID NO: 763 - DNA, 25 bp, Homo sapiens
  source 1..25: mol_type = genomic DNA
cggcttgtggcacagttgacaagga

SEQ ID NO: 764 - DNA, 25 bp, Homo sapiens
  source 1..25: mol_type = genomic DNA
ggcttgtggcacagttgacaaggat

SEQ ID NO: 765 - DNA, 25 bp, Homo sapiens
  source 1..25: mol_type = genomic DNA
gcttgtggcacagttgacaaggatg

SEQ ID NO: 766 - DNA, 25 bp, Homo sapiens
  source 1..25: mol_type = genomic DNA
cttgtggcacagttgacaaggatga

SEQ ID NO: 767 - DNA, 25 bp, Homo sapiens
  source 1..25: mol_type = genomic DNA
ttgtggcacagttgacaaggatgat

SEQ ID NO: 768 - DNA, 25 bp, Homo sapiens
  source 1..25: mol_type = genomic DNA
tgtggcacagttgacaaggatgata

SEQ ID NO: 769 - DNA, 25 bp, Homo sapiens
  source 1..25: mol_type = genomic DNA
gtggcacagttgacaaggatgataa

SEQ ID NO: 770 - DNA, 25 bp, Homo sapiens
  source 1..25: mol_type = genomic DNA
tggcacagttgacaaggatgataaa

SEQ ID NO: 771 - DNA, 25 bp, Homo sapiens
  source 1..25: mol_type = genomic DNA
ggcacagttgacaaggatgataaat

SEQ ID NO: 772 - DNA, 25 bp, Homo sapiens
  source 1..25: mol_type = genomic DNA
gcacagttgacaaggatgataaatc

SEQ ID NO: 773 - DNA, 25 bp, Homo sapiens
  source 1..25: mol_type = genomic DNA
cacagttgacaaggatgataaatca

SEQ ID NO: 774 - DNA, 25 bp, Homo sapiens
  source 1..25: mol_type = genomic DNA
acagttgacaaggatgataaatcaa

SEQ ID NO: 775 - DNA, 25 bp, Homo sapiens
  source 1..25: mol_type = genomic DNA
cagttgacaaggatgataaatcaat

SEQ ID NO: 776 - DNA, 25 bp, Homo sapiens
  source 1..25: mol_type = genomic DNA
agttgacaaggatgataaatcaata

SEQ ID NO: 777 - DNA, 25 bp, Homo sapiens
  source 1..25: mol_type = genomic DNA
gttgacaaggatgataaatcaataa

SEQ ID NO: 778 - DNA, 25 bp, Homo sapiens
  source 1..25: mol_type = genomic DNA
ttgacaaggatgataaatcaataat

SEQ ID NO: 779 - DNA, 25 bp, Homo sapiens
  source 1..25: mol_type = genomic DNA
tgacaaggatgataaatcaataatg

SEQ ID NO: 780 - DNA, 25 bp, Homo sapiens
  source 1..25: mol_type = genomic DNA
gacaaggatgataaatcaataatgc

SEQ ID NO: 781 - DNA, 25 bp, Homo sapiens
  source 1..25: mol_type = genomic DNA
acaaggatgataaatcaataatgca

SEQ ID NO: 782 - DNA, 25 bp, Homo sapiens
  source 1..25: mol_type = genomic DNA
caaggatgataaatcaataatgcaa

SEQ ID NO: 783 - DNA, 25 bp, Homo sapiens
  source 1..25: mol_type = genomic DNA
aaggatgataaatcaataatgcaag

SEQ ID NO: 784 - DNA, 25 bp, Homo sapiens
  source 1..25: mol_type = genomic DNA
aggatgataaatcaataatgcaagc

SEQ ID NO: 785 - DNA, 25 bp, Homo sapiens
  source 1..25: mol_type = genomic DNA
ggatgataaatcaataatgcaagct

SEQ ID NO: 786 - DNA, 25 bp, Homo sapiens
  source 1..25: mol_type = genomic DNA
gatgataaatcaataatgcaagctt

SEQ ID NO: 787 - DNA, 25 bp, Homo sapiens
  source 1..25: mol_type = genomic DNA
atgataaatcaataatgcaagctta

SEQ ID NO: 788 - DNA, 25 bp, Homo sapiens
  source 1..25: mol_type = genomic DNA
tgataaatcaataatgcaagcttac

SEQ ID NO: 789 - DNA, 25 bp, Homo sapiens
  source 1..25: mol_type = genomic DNA
gataaatcaataatgcaagcttact

SEQ ID NO: 790 - DNA, 25 bp, Homo sapiens
  source 1..25: mol_type = genomic DNA
ataaatcaataatgcaagcttacta

SEQ ID NO: 791 - DNA, 25 bp, Homo sapiens
  source 1..25: mol_type = genomic DNA
taaatcaataatgcaagcttactat

SEQ ID NO: 792 - DNA, 25 bp, Homo sapiens
  source 1..25: mol_type = genomic DNA
aaatcaataatgcaagcttactatc

SEQ ID NO: 793 - DNA, 25 bp, Homo sapiens
  source 1..25: mol_type = genomic DNA
aatcaataatgcaagcttactatca

SEQ ID NO: 794 - DNA, 25 bp, Homo sapiens
  source 1..25: mol_type = genomic DNA
atcaataatgcaagcttactatcat

SEQ ID NO: 795 - DNA, 25 bp, Homo sapiens
  source 1..25: mol_type = genomic DNA
tcaataatgcaagcttactatcatt

SEQ ID NO: 796 - DNA, 25 bp, Homo sapiens
  source 1..25: mol_type = genomic DNA
caataatgcaagcttactatcattt

SEQ ID NO: 797 - DNA, 25 bp, Homo sapiens
  source 1..25: mol_type = genomic DNA
aataatgcaagcttactatcattta

SEQ ID NO: 798 - DNA, 25 bp, Homo sapiens
  source 1..25: mol_type = genomic DNA
ataatgcaagcttactatcatttat

SEQ ID NO: 799 - DNA, 25 bp, Homo sapiens
  source 1..25: mol_type = genomic DNA
taatgcaagcttactatcatttatg

SEQ ID NO: 800 - DNA, 25 bp, Homo sapiens
  source 1..25: mol_type = genomic DNA
aatgcaagcttactatcatttatga

SEQ ID NO: 801 - DNA, 25 bp, Homo sapiens
  source 1..25: mol_type = genomic DNA
atgcaagcttactatcatttatgaa

SEQ ID NO: 802 - DNA, 25 bp, Homo sapiens
  source 1..25: mol_type = genomic DNA
tgcaagcttactatcatttatgaat

SEQ ID NO: 803 - DNA, 25 bp, Homo sapiens
  source 1..25: mol_type = genomic DNA
gcaagcttactatcatttatgaata

SEQ ID NO: 804 - DNA, 25 bp, Homo sapiens
  source 1..25: mol_type = genomic DNA
caagcttactatcatttatgaatag

SEQ ID NO: 805 - DNA, 25 bp, Homo sapiens
  source 1..25: mol_type = genomic DNA
aagcttactatcatttatgaatagc

SEQ ID NO: 806 - DNA, 25 bp, Homo sapiens
  source 1..25: mol_type = genomic DNA
agcttactatcatttatgaatagca

SEQ ID NO: 807 - DNA, 25 bp, Homo sapiens
  source 1..25: mol_type = genomic DNA
gcttactatcatttatgaatagcaa

SEQ ID NO: 808 - DNA, 25 bp, Homo sapiens
  source 1..25: mol_type = genomic DNA
cttactatcatttatgaatagcaat

SEQ ID NO: 809 - DNA, 25 bp, Homo sapiens
  source 1..25: mol_type = genomic DNA
ttactatcatttatgaatagcaata

SEQ ID NO: 810 - DNA, 25 bp, Homo sapiens
  source 1..25: mol_type = genomic DNA
tactatcatttatgaatagcaatac

SEQ ID NO: 811 - DNA, 25 bp, Homo sapiens
  source 1..25: mol_type = genomic DNA
actatcatttatgaatagcaatact

SEQ ID NO: 812 - DNA, 25 bp, Homo sapiens
  source 1..25: mol_type = genomic DNA
ctatcatttatgaatagcaatactg

SEQ ID NO: 813 - DNA, 25 bp, Homo sapiens
  source 1..25: mol_type = genomic DNA
tatcatttatgaatagcaatactga

SEQ ID NO: 814 - DNA, 25 bp, Homo sapiens
  source 1..25: mol_type = genomic DNA
atcatttatgaatagcaatactgaa

SEQ ID NO: 815 - DNA, 25 bp, Homo sapiens
  source 1..25: mol_type = genomic DNA
tcatttatgaatagcaatactgaag

SEQ ID NO: 816 - DNA, 25 bp, Homo sapiens
  source 1..25: mol_type = genomic DNA
catttatgaatagcaatactgaaga

SEQ ID NO: 817 - DNA, 25 bp, Homo sapiens
  source 1..25: mol_type = genomic DNA
atttatgaatagcaatactgaagaa

SEQ ID NO: 818 - DNA, 25 bp, Homo sapiens
  source 1..25: mol_type = genomic DNA
tttatgaatagcaatactgaagaaa

SEQ ID NO: 819 - DNA, 25 bp, Homo sapiens
  source 1..25: mol_type = genomic DNA
ttatgaatagcaatactgaagaaat

SEQ ID NO: 820 - DNA, 25 bp, Homo sapiens
  source 1..25: mol_type = genomic DNA
tatgaatagcaatactgaagaaatt

SEQ ID NO: 821 - DNA, 25 bp, Homo sapiens
  source 1..25: mol_type = genomic DNA
atgaatagcaatactgaagaaatta

SEQ ID NO: 822 - DNA, 25 bp, Homo sapiens
  source 1..25: mol_type = genomic DNA
tgaatagcaatactgaagaaattaa

SEQ ID NO: 823 - DNA, 25 bp, Homo sapiens
  source 1..25: mol_type = genomic DNA
gaatagcaatactgaagaaattaaa

SEQ ID NO: 824 - DNA, 25 bp, Homo sapiens
  source 1..25: mol_type = genomic DNA
aatagcaatactgaagaaattaaaa

SEQ ID NO: 825 - DNA, 25 bp, Homo sapiens
  source 1..25: mol_type = genomic DNA
atagcaatactgaagaaattaaaac

SEQ ID NO: 826 - DNA, 25 bp, Homo sapiens
  source 1..25: mol_type = genomic DNA
tagcaatactgaagaaattaaaaca

SEQ ID NO: 827 - DNA, 25 bp, Homo sapiens
  source 1..25: mol_type = genomic DNA
agcaatactgaagaaattaaaacaa

SEQ ID NO: 828 - DNA, 25 bp, Homo sapiens
  source 1..25: mol_type = genomic DNA
gcaatactgaagaaattaaaacaaa

SEQ ID NO: 829 - DNA, 25 bp, Homo sapiens
  source 1..25: mol_type = genomic DNA
caatactgaagaaattaaaacaaaa

SEQ ID NO: 830 - DNA, 25 bp, Homo sapiens
  source 1..25: mol_type = genomic DNA
aatactgaagaaattaaaacaaaag

SEQ ID NO: 831 - DNA, 25 bp, Homo sapiens
  source 1..25: mol_type = genomic DNA
atactgaagaaattaaaacaaaaga

SEQ ID NO: 832 - DNA, 25 bp, Homo sapiens
  source 1..25: mol_type = genomic DNA
tactgaagaaattaaaacaaaagat

SEQ ID NO: 833 - DNA, 25 bp, Homo sapiens
  source 1..25: mol_type = genomic DNA
actgaagaaattaaaacaaaagatt

SEQ ID NO: 834 - DNA, 25 bp, Homo sapiens
  source 1..25: mol_type = genomic DNA
ctgaagaaattaaaacaaaagattg

SEQ ID NO: 835 - DNA, 25 bp, Homo sapiens
  source 1..25: mol_type = genomic DNA
tgaagaaattaaaacaaaagattgc

SEQ ID NO: 836 - DNA, 25 bp, Homo sapiens
  source 1..25: mol_type = genomic DNA
gaagaaattaaaacaaaagattgct

SEQ ID NO: 837 - DNA, 25 bp, Homo sapiens
  source 1..25: mol_type = genomic DNA
aagaaattaaaacaaaagattgctg

SEQ ID NO: 838 - DNA, 25 bp, Homo sapiens
  source 1..25: mol_type = genomic DNA
agaaattaaaacaaaagattgctgt

SEQ ID NO: 839 - DNA, 25 bp, Homo sapiens
  source 1..25: mol_type = genomic DNA
gaaattaaaacaaaagattgctgtc

SEQ ID NO: 840 - DNA, 25 bp, Homo sapiens
  source 1..25: mol_type = genomic DNA
aaattaaaacaaaagattgctgtct

SEQ ID NO: 841 - DNA, 25 bp, Homo sapiens
  source 1..25: mol_type = genomic DNA
aattaaaacaaaagattgctgtctc

SEQ ID NO: 842 - DNA, 25 bp, Homo sapiens
  source 1..25: mol_type = genomic DNA
attaaaacaaaagattgctgtctca

SEQ ID NO: 843 - DNA, 25 bp, Homo sapiens
  source 1..25: mol_type = genomic DNA
ttaaaacaaaagattgctgtctcaa

SEQ ID NO: 844 - DNA, 25 bp, Homo sapiens
  source 1..25: mol_type = genomic DNA
taaaacaaaagattgctgtctcaat

SEQ ID NO: 845 - DNA, 25 bp, Homo sapiens
  source 1..25: mol_type = genomic DNA
aaaacaaaagattgctgtctcaata

SEQ ID NO: 846 - DNA, 25 bp, Homo sapiens
  source 1..25: mol_type = genomic DNA
aaacaaaagattgctgtctcaatat

SEQ ID NO: 847 - DNA, 25 bp, Homo sapiens
  source 1..25: mol_type = genomic DNA
aacaaaagattgctgtctcaatata

SEQ ID NO: 848 - DNA, 25 bp, Homo sapiens
  source 1..25: mol_type = genomic DNA
acaaaagattgctgtctcaatatat

SEQ ID NO: 849 - DNA, 25 bp, Homo sapiens
  source 1..25: mol_type = genomic DNA
caaaagattgctgtctcaatatatc

SEQ ID NO: 850 - DNA, 25 bp, Homo sapiens
  source 1..25: mol_type = genomic DNA
aaaagattgctgtctcaatatatct

SEQ ID NO: 851 - DNA, 25 bp, Homo sapiens
  source 1..25: mol_type = genomic DNA
aaagattgctgtctcaatatatctt

SEQ ID NO: 852 - DNA, 25 bp, Homo sapiens
  source 1..25: mol_type = genomic DNA
aagattgctgtctcaatatatctta

SEQ ID NO: 853 - DNA, 25 bp, Homo sapiens
  source 1..25: mol_type = genomic DNA
agattgctgtctcaatatatcttat

SEQ ID NO: 854 - DNA, 25 bp, Homo sapiens
  source 1..25: mol_type = genomic DNA
gattgctgtctcaatatatcttata

SEQ ID NO: 855 - DNA, 25 bp, Homo sapiens
  source 1..25: mol_type = genomic DNA
attgctgtctcaatatatcttatat

SEQ ID NO: 856 - DNA, 25 bp, Homo sapiens
  source 1..25: mol_type = genomic DNA
ttgctgtctcaatatatcttatatt

SEQ ID NO: 857 - DNA, 25 bp, Homo sapiens
  source 1..25: mol_type = genomic DNA
tgctgtctcaatatatcttatattt

SEQ ID NO: 858 - DNA, 25 bp, Homo sapiens
  source 1..25: mol_type = genomic DNA
gctgtctcaatatatcttatattta

SEQ ID NO: 859 - DNA, 25 bp, Homo sapiens
  source 1..25: mol_type = genomic DNA
ctgtctcaatatatcttatatttat

SEQ ID NO: 860 - DNA, 25 bp, Homo sapiens
  source 1..25: mol_type = genomic DNA
tgtctcaatatatcttatatttatt

SEQ ID NO: 861 - DNA, 25 bp, Homo sapiens
  source 1..25: mol_type = genomic DNA
gtctcaatatatcttatatttatta

SEQ ID NO: 862 - DNA, 25 bp, Homo sapiens
  source 1..25: mol_type = genomic DNA
tctcaatatatcttatatttattat

SEQ ID NO: 863 - DNA, 25 bp, Homo sapiens
  source 1..25: mol_type = genomic DNA
ctcaatatatcttatatttattatt

SEQ ID NO: 864 - DNA, 25 bp, Homo sapiens
  source 1..25: mol_type = genomic DNA
tcaatatatcttatatttattattt

SEQ ID NO: 865 - DNA, 25 bp, Homo sapiens
  source 1..25: mol_type = genomic DNA
caatatatcttatatttattattta

SEQ ID NO: 866 - DNA, 25 bp, Homo sapiens
  source 1..25: mol_type = genomic DNA
aatatatcttatatttattatttac

SEQ ID NO: 867 - DNA, 25 bp, Homo sapiens
  source 1..25: mol_type = genomic DNA
atatatcttatatttattatttacc

SEQ ID NO: 868 - DNA, 25 bp, Homo sapiens
  source 1..25: mol_type = genomic DNA
tatatcttatatttattatttacca

SEQ ID NO: 869 - DNA, 25 bp, Homo sapiens
  source 1..25: mol_type = genomic DNA
atatcttatatttattatttaccaa

SEQ ID NO: 870 - DNA, 25 bp, Homo sapiens
  source 1..25: mol_type = genomic DNA
tatcttatatttattatttaccaaa

SEQ ID NO: 871 - DNA, 25 bp, Homo sapiens
  source 1..25: mol_type = genomic DNA
atcttatatttattatttaccaaat

SEQ ID NO: 872 - DNA, 25 bp, Homo sapiens
  source 1..25: mol_type = genomic DNA
tcttatatttattatttaccaaatt

SEQ ID NO: 873 - DNA, 25 bp, Homo sapiens
  source 1..25: mol_type = genomic DNA
cttatatttattatttaccaaatta

SEQ ID NO: 874 - DNA, 25 bp, Homo sapiens
  source 1..25: mol_type = genomic DNA
ttatatttattatttaccaaattat

SEQ ID NO: 875 - DNA, 25 bp, Homo sapiens
  source 1..25: mol_type = genomic DNA
tatatttattatttaccaaattatt

SEQ ID NO: 876 - DNA, 25 bp, Homo sapiens
  source 1..25: mol_type = genomic DNA
atatttattatttaccaaattattc

SEQ ID NO: 877 - DNA, 25 bp, Homo sapiens
  source 1..25: mol_type = genomic DNA
tatttattatttaccaaattattct

SEQ ID NO: 878 - DNA, 25 bp, Homo sapiens
  source 1..25: mol_type = genomic DNA
atttattatttaccaaattattcta

SEQ ID NO: 879 - DNA, 25 bp, Homo sapiens
  source 1..25: mol_type = genomic DNA
tttattatttaccaaattattctaa

SEQ ID NO: 880 - DNA, 25 bp, Homo sapiens
  source 1..25: mol_type = genomic DNA
ttattatttaccaaattattctaag

SEQ ID NO: 881 - DNA, 25 bp, Homo sapiens
  source 1..25: mol_type = genomic DNA
tattatttaccaaattattctaaga

SEQ ID NO: 882 - DNA, 25 bp, Homo sapiens
  source 1..25: mol_type = genomic DNA
attatttaccaaattattctaagag

SEQ ID NO: 883 - DNA, 25 bp, Homo sapiens
  source 1..25: mol_type = genomic DNA
ttatttaccaaattattctaagagt

SEQ ID NO: 884 - DNA, 25 bp, Homo sapiens
  source 1..25: mol_type = genomic DNA
tatttaccaaattattctaagagta

SEQ ID NO: 885 - DNA, 25 bp, Homo sapiens
  source 1..25: mol_type = genomic DNA
atttaccaaattattctaagagtat

SEQ ID NO: 886 - DNA, 25 bp, Homo sapiens
  source 1..25: mol_type = genomic DNA
tttaccaaattattctaagagtatt

SEQ ID NO: 887 - DNA, 25 bp, Homo sapiens
  source 1..25: mol_type = genomic DNA
ttaccaaattattctaagagtattt

SEQ ID NO: 888 - DNA, 25 bp, Homo sapiens
  source 1..25: mol_type = genomic DNA
taccaaattattctaagagtatttc

SEQ ID NO: 889 - DNA, 25 bp, Homo sapiens
  source 1..25: mol_type = genomic DNA
accaaattattctaagagtatttct

SEQ ID NO: 890 - DNA, 25 bp, Homo sapiens
  source 1..25: mol_type = genomic DNA
ccaaattattctaagagtatttctt

SEQ ID NO: 891 - DNA, 25 bp, Homo sapiens
  source 1..25: mol_type = genomic DNA
caaattattctaagagtatttcttc

SEQ ID NO: 892 - DNA, 25 bp, Homo sapiens
  source 1..25: mol_type = genomic DNA
aaattattctaagagtatttcttcc

SEQ ID NO: 893 - RNA, 25 nt, synthetic construct
  source 1..25: mol_type = other RNA
ggagggatacctgtatattacaagt

SEQ ID NO: 894 - RNA, 25 nt, synthetic construct
  source 1..25: mol_type = other RNA
aggagggatacctgtatattacaag

SEQ ID NO: 895 - RNA, 25 nt, synthetic construct
  source 1..25: mol_type = other RNA
caggagggatacctgtatattacaa

SEQ ID NO: 896 - RNA, 25 nt, synthetic construct
  source 1..25: mol_type = other RNA
ccaggagggatacctgtatattaca

SEQ ID NO: 897 - RNA, 25 nt, synthetic construct
  source 1..25: mol_type = other RNA
accaggagggatacctgtatattac

SEQ ID NO: 898 - RNA, 25 nt, synthetic construct
  source 1..25: mol_type = other RNA
taccaggagggatacctgtatatta

SEQ ID NO: 899 - RNA, 25 nt, synthetic construct
  source 1..25: mol_type = other RNA
ttaccaggagggatacctgtatatt

SEQ ID NO: 900 - RNA, 25 nt, synthetic construct
  source 1..25: mol_type = other RNA
cttaccaggagggatacctgtatat

SEQ ID NO: 901 - RNA, 25 nt, synthetic construct
  source 1..25: mol_type = other RNA
gcttaccaggagggatacctgtata

SEQ ID NO: 902 - RNA, 25 nt, synthetic construct
  source 1..25: mol_type = other RNA
agcttaccaggagggatacctgtat

SEQ ID NO: 903 - RNA, 25 nt, synthetic construct
  source 1..25: mol_type = other RNA
gagcttaccaggagggatacctgta

SEQ ID NO: 904 - RNA, 25 nt, synthetic construct
  source 1..25: mol_type = other RNA
agagcttaccaggagggatacctgt

SEQ ID NO: 905 - RNA, 25 nt, synthetic construct
  source 1..25: mol_type = other RNA
cagagcttaccaggagggatacctg

SEQ ID NO: 906 - RNA, 25 nt, synthetic construct
  source 1..25: mol_type = other RNA
ccagagcttaccaggagggatacct

SEQ ID NO: 907 - RNA, 25 nt, synthetic construct
  source 1..25: mol_type = other RNA
accagagcttaccaggagggatacc

SEQ ID NO: 908 - RNA, 25 nt, synthetic construct
  source 1..25: mol_type = other RNA
taccagagcttaccaggagggatac

SEQ ID NO: 909 - RNA, 25 nt, synthetic construct
  source 1..25: mol_type = other RNA
ataccagagcttaccaggagggata

SEQ ID NO: 910 - RNA, 25 nt, synthetic construct
  source 1..25: mol_type = other RNA
aataccagagcttaccaggagggat

SEQ ID NO: 911 - RNA, 25 nt, synthetic construct
  source 1..25: mol_type = other RNA
taataccagagcttaccaggaggga

SEQ ID NO: 912 - RNA, 25 nt, synthetic construct
  source 1..25: mol_type = other RNA
ataataccagagcttaccaggaggg

SEQ ID NO: 913 - RNA, 25 nt, synthetic construct
  source 1..25: mol_type = other RNA
cataataccagagcttaccaggagg

SEQ ID NO: 914 - RNA, 25 nt, synthetic construct
  source 1..25: mol_type = other RNA
acataataccagagcttaccaggag

SEQ ID NO: 915 - RNA, 25 nt, synthetic construct
  source 1..25: mol_type = other RNA
gacataataccagagcttaccagga

SEQ ID NO: 916 - RNA, 25 nt, synthetic construct
  source 1..25: mol_type = other RNA
agacataataccagagcttaccagg

SEQ ID NO: 917 - RNA, 25 nt, synthetic construct
  source 1..25: mol_type = other RNA
aagacataataccagagcttaccag

SEQ ID NO: 918 - RNA, 25 nt, synthetic construct
  source 1..25: mol_type = other RNA
taagacataataccagagcttacca

SEQ ID NO: 919 - RNA, 25 nt, synthetic construct
  source 1..25: mol_type = other RNA
ttaagacataataccagagcttacc

SEQ ID NO: 920 - RNA, 25 nt, synthetic construct
  source 1..25: mol_type = other RNA
gttaagacataataccagagcttac

SEQ ID NO: 921 - RNA, 25 nt, synthetic construct
  source 1..25: mol_type = other RNA
tgttaagacataataccagagctta

SEQ ID NO: 922 - RNA, 25 nt, synthetic construct
  source 1..25: mol_type = other RNA
atgttaagacataataccagagctt

SEQ ID NO: 923 - RNA, 25 nt, synthetic construct
  source 1..25: mol_type = other RNA
aatgttaagacataataccagagct

SEQ ID NO: 924 - RNA, 25 nt, synthetic construct
  source 1..25: mol_type = other RNA
aaatgttaagacataataccagagc

SEQ ID NO: 925 - RNA, 25 nt, synthetic construct
  source 1..25: mol_type = other RNA
aaaatgttaagacataataccagag

SEQ ID NO: 926 - RNA, 25 nt, synthetic construct
  source 1..25: mol_type = other RNA
aaaaatgttaagacataataccaga

SEQ ID NO: 927 - RNA, 25 nt, synthetic construct
  source 1..25: mol_type = other RNA
taaaaatgttaagacataataccag

SEQ ID NO: 928 - RNA, 25 nt, synthetic construct
  source 1..25: mol_type = other RNA
ttaaaaatgttaagacataatacca

SEQ ID NO: 929 - RNA, 25 nt, synthetic construct
  source 1..25: mol_type = other RNA
tttaaaaatgttaagacataatacc

SEQ ID NO: 930 - RNA, 25 nt, synthetic construct
  source 1..25: mol_type = other RNA
atttaaaaatgttaagacataatac

SEQ ID NO: 931 - RNA, 25 nt, synthetic construct
  source 1..25: mol_type = other RNA
gatttaaaaatgttaagacataata

SEQ ID NO: 932 - RNA, 25 nt, synthetic construct
  source 1..25: mol_type = other RNA
agatttaaaaatgttaagacataat

SEQ ID NO: 933 - RNA, 25 nt, synthetic construct
  source 1..25: mol_type = other RNA
tagatttaaaaatgttaagacataa

SEQ ID NO: 934 - RNA, 25 nt, synthetic construct
  source 1..25: mol_type = other RNA
atagatttaaaaatgttaagacata

SEQ ID NO: 935 - RNA, 25 nt, synthetic construct
  source 1..25: mol_type = other RNA
catagatttaaaaatgttaagacat

SEQ ID NO: 936 - RNA, 25 nt, synthetic construct
  source 1..25: mol_type = other RNA
ccatagatttaaaaatgttaagaca

SEQ ID NO: 937 - RNA, 25 nt, synthetic construct
  source 1..25: mol_type = other RNA
accatagatttaaaaatgttaagac

SEQ ID NO: 938 - RNA, 25 nt, synthetic construct
  source 1..25: mol_type = other RNA
taccatagatttaaaaatgttaaga

SEQ ID NO: 939 - RNA, 25 nt, synthetic construct
  source 1..25: mol_type = other RNA
ttaccatagatttaaaaatgttaag

SEQ ID NO: 940 - RNA, 25 nt, synthetic construct
  source 1..25: mol_type = other RNA
attaccatagatttaaaaatgttaa

SEQ ID NO: 941 - RNA, 25 nt, synthetic construct
  source 1..25: mol_type = other RNA
gattaccatagatttaaaaatgtta

SEQ ID NO: 942 - RNA, 25 nt, synthetic construct
  source 1..25: mol_type = other RNA
agattaccatagatttaaaaatgtt

SEQ ID NO: 943 - RNA, 25 nt, synthetic construct
  source 1..25: mol_type = other RNA
aagattaccatagatttaaaaatgt

SEQ ID NO: 944 - RNA, 25 nt, synthetic construct
  source 1..25: mol_type = other RNA
aaagattaccatagatttaaaaatg

SEQ ID NO: 945 - RNA, 25 nt, synthetic construct
  source 1..25: mol_type = other RNA
taaagattaccatagatttaaaaat

SEQ ID NO: 946 - RNA, 25 nt, synthetic construct
  source 1..25: mol_type = other RNA
gtaaagattaccatagatttaaaaa

SEQ ID NO: 947 - RNA, 25 nt, synthetic construct
  source 1..25: mol_type = other RNA
tgtaaagattaccatagatttaaaa

SEQ ID NO: 948 - RNA, 25 nt, synthetic construct
  source 1..25: mol_type = other RNA
ttgtaaagattaccatagatttaaa

SEQ ID NO: 949 - RNA, 25 nt, synthetic construct
  source 1..25: mol_type = other RNA
tttgtaaagattaccatagatttaa

SEQ ID NO: 950 - RNA, 25 nt, synthetic construct
  source 1..25: mol_type = other RNA
ttttgtaaagattaccatagattta

SEQ ID NO: 951 - RNA, 25 nt, synthetic construct
  source 1..25: mol_type = other RNA
attttgtaaagattaccatagattt

SEQ ID NO: 952 - RNA, 25 nt, synthetic construct
  source 1..25: mol_type = other RNA
tattttgtaaagattaccatagatt

SEQ ID NO: 953 - RNA, 25 nt, synthetic construct
  source 1..25: mol_type = other RNA
atattttgtaaagattaccatagat

SEQ ID NO: 954 - RNA, 25 nt, synthetic construct
  source 1..25: mol_type = other RNA
aatattttgtaaagattaccataga

SEQ ID NO: 955 - RNA, 25 nt, synthetic construct
  source 1..25: mol_type = other RNA
aaatattttgtaaagattaccatag

SEQ ID NO: 956 - RNA, 25 nt, synthetic construct
  source 1..25: mol_type = other RNA
aaaatattttgtaaagattaccata

SEQ ID NO: 957 - RNA, 25 nt, synthetic construct
  source 1..25: mol_type = other RNA
taaaatattttgtaaagattaccat

SEQ ID NO: 958 - RNA, 25 nt, synthetic construct
  source 1..25: mol_type = other RNA
gtaaaatattttgtaaagattacca

SEQ ID NO: 959 - RNA, 25 nt, synthetic construct
  source 1..25: mol_type = other RNA
agtaaaatattttgtaaagattacc

SEQ ID NO: 960 - RNA, 25 nt, synthetic construct
  source 1..25: mol_type = other RNA
aagtaaaatattttgtaaagattac

SEQ ID NO: 961 - RNA, 25 nt, synthetic construct
  source 1..25: mol_type = other RNA
gaagtaaaatattttgtaaagatta

SEQ ID NO: 962 - RNA, 25 nt, synthetic construct
  source 1..25: mol_type = other RNA
ggaagtaaaatattttgtaaagatt

SEQ ID NO: 963 - RNA, 25 nt, synthetic construct
  source 1..25: mol_type = other RNA
cggaagtaaaatattttgtaaagat

SEQ ID NO: 964 - RNA, 25 nt, synthetic construct
  source 1..25: mol_type = other RNA
tcggaagtaaaatattttgtaaaga

SEQ ID NO: 965 - RNA, 25 nt, synthetic construct
  source 1..25: mol_type = other RNA
ttcggaagtaaaatattttgtaaag

SEQ ID NO: 966 - RNA, 25 nt, synthetic construct
  source 1..25: mol_type = other RNA
gttcggaagtaaaatattttgtaaa

SEQ ID NO: 967 - RNA, 25 nt, synthetic construct
  source 1..25: mol_type = other RNA
agttcggaagtaaaatattttgtaa

SEQ ID NO: 968 - RNA, 25 nt, synthetic construct
  source 1..25: mol_type = other RNA
gagttcggaagtaaaatattttgta

SEQ ID NO: 969 - RNA, 25 nt, synthetic construct
  source 1..25: mol_type = other RNA
tgagttcggaagtaaaatattttgt

SEQ ID NO: 970 - RNA, 25 nt, synthetic construct
  source 1..25: mol_type = other RNA
atgagttcggaagtaaaatattttg

SEQ ID NO: 971 - RNA, 25 nt, synthetic construct
  source 1..25: mol_type = other RNA
tatgagttcggaagtaaaatatttt

SEQ ID NO: 972 - RNA, 25 nt, synthetic construct
  source 1..25: mol_type = other RNA
atatgagttcggaagtaaaatattt

SEQ ID NO: 973 - RNA, 25 nt, synthetic construct
  source 1..25: mol_type = other RNA
tatatgagttcggaagtaaaatatt

SEQ ID NO: 974 - RNA, 25 nt, synthetic construct
  source 1..25: mol_type = other RNA
gtatatgagttcggaagtaaaatat

SEQ ID NO: 975 - RNA, 25 nt, synthetic construct
  source 1..25: mol_type = other RNA
ggtatatgagttcggaagtaaaata

SEQ ID NO: 976 - RNA, 25 nt, synthetic construct
  source 1..25: mol_type = other RNA
aggtatatgagttcggaagtaaaat

SEQ ID NO: 977 - RNA, 25 nt, synthetic construct
  source 1..25: mol_type = other RNA
caggtatatgagttcggaagtaaaa

SEQ ID NO: 978 - RNA, 25 nt, synthetic construct
  source 1..25: mol_type = other RNA
ccaggtatatgagttcggaagtaaa

SEQ ID NO: 979 - RNA, 25 nt, synthetic construct
  source 1..25: mol_type = other RNA
cccaggtatatgagttcggaagtaa

SEQ ID NO: 980 - RNA, 25 nt, synthetic construct
  source 1..25: mol_type = other RNA
ccccaggtatatgagttcggaagta

SEQ ID NO: 981 - RNA, 25 nt, synthetic construct
  source 1..25: mol_type = other RNA
tccccaggtatatgagttcggaagt

SEQ ID NO: 982 - RNA, 25 nt, synthetic construct
  source 1..25: mol_type = other RNA
atccccaggtatatgagttcggaag

SEQ ID NO: 983 - RNA, 25 nt, synthetic construct
  source 1..25: mol_type = other RNA
aatccccaggtatatgagttcggaa

SEQ ID NO: 984 - RNA, 25 nt, synthetic construct
  source 1..25: mol_type = other RNA
aaatccccaggtatatgagttcgga

SEQ ID NO: 985 - RNA, 25 nt, synthetic construct
  source 1..25: mol_type = other RNA
aaaatccccaggtatatgagttcgg

SEQ ID NO: 986 - RNA, 25 nt, synthetic construct
  source 1..25: mol_type = other RNA
taaaatccccaggtatatgagttcg

SEQ ID NO: 987 - RNA, 25 nt, synthetic construct
  source 1..25: mol_type = other RNA
ataaaatccccaggtatatgagttc

SEQ ID NO: 988 - RNA, 25 nt, synthetic construct
  source 1..25: mol_type = other RNA
aataaaatccccaggtatatgagtt

SEQ ID NO: 989 - RNA, 25 nt, synthetic construct
  source 1..25: mol_type = other RNA
taataaaatccccaggtatatgagt

SEQ ID NO: 990 - RNA, 25 nt, synthetic construct
  source 1..25: mol_type = other RNA
gtaataaaatccccaggtatatgag

SEQ ID NO: 991 - RNA, 25 nt, synthetic construct
  source 1..25: mol_type = other RNA
agtaataaaatccccaggtatatga

SEQ ID NO: 992 - RNA, 25 nt, synthetic construct
  source 1..25: mol_type = other RNA
gagtaataaaatccccaggtatatg

SEQ ID NO: 993 - RNA, 25 nt, synthetic construct
  source 1..25: mol_type = other RNA
agagtaataaaatccccaggtatat

SEQ ID NO: 994 - RNA, 25 nt, synthetic construct
  source 1..25: mol_type = other RNA
cagagtaataaaatccccaggtata

SEQ ID NO: 995 - RNA, 25 nt, synthetic construct
  source 1..25: mol_type = other RNA
ccagagtaataaaatccccaggtat

SEQ ID NO: 996 - RNA, 25 nt, synthetic construct
  source 1..25: mol_type = other RNA
cccagagtaataaaatccccaggta

SEQ ID NO: 997 - RNA, 25 nt, synthetic construct
  source 1..25: mol_type = other RNA
tcccagagtaataaaatccccaggt

SEQ ID NO: 998 - RNA, 25 nt, synthetic construct
  source 1..25: mol_type = other RNA
ttcccagagtaataaaatccccagg

SEQ ID NO: 999 - RNA, 25 nt, synthetic construct
  source 1..25: mol_type = other RNA
attcccagagtaataaaatccccag

SEQ ID NO: 1000 - RNA, 25 nt, synthetic construct
  source 1..25: mol_type = other RNA
aattcccagagtaataaaatcccca

SEQ ID NO: 1001 - RNA, 25 nt, synthetic construct
  source 1..25: mol_type = other RNA
taattcccagagtaataaaatcccc

SEQ ID NO: 1002 - RNA, 25 nt, synthetic construct
  source 1..25: mol_type = other RNA
ataattcccagagtaataaaatccc

SEQ ID NO: 1003 - RNA, 25 nt, synthetic construct
  source 1..25: mol_type = other RNA
cataattcccagagtaataaaatcc

SEQ ID NO: 1004 - RNA, 25 nt, synthetic construct
  source 1..25: mol_type = other RNA
acataattcccagagtaataaaatc

SEQ ID NO: 1005 - RNA, 25 nt, synthetic construct
  source 1..25: mol_type = other RNA
cacataattcccagagtaataaaat

SEQ ID NO: 1006 - RNA, 25 nt, synthetic construct
  source 1..25: mol_type = other RNA
acacataattcccagagtaataaaa

SEQ ID NO: 1007 - RNA, 25 nt, synthetic construct
  source 1..25: mol_type = other RNA
aacacataattcccagagtaataaa

SEQ ID NO: 1008 - RNA, 25 nt, synthetic construct
  source 1..25: mol_type = other RNA
gaacacataattcccagagtaataa

SEQ ID NO: 1009 - RNA, 25 nt, synthetic construct
  source 1..25: mol_type = other RNA
agaacacataattcccagagtaata

SEQ ID NO: 1010 - RNA, 25 nt, synthetic construct
  source 1..25: mol_type = other RNA
cagaacacataattcccagagtaat

SEQ ID NO: 1011 - RNA, 25 nt, synthetic construct
  source 1..25: mol_type = other RNA
gcagaacacataattcccagagtaa

SEQ ID NO: 1012 - RNA, 25 nt, synthetic construct
  source 1..25: mol_type = other RNA
ggcagaacacataattcccagagta

SEQ ID NO: 1013 - RNA, 25 nt, synthetic construct
  source 1..25: mol_type = other RNA
gggcagaacacataattcccagagt

SEQ ID NO: 1014 - RNA, 25 nt, synthetic construct
  source 1..25: mol_type = other RNA
ggggcagaacacataattcccagag

SEQ ID NO: 1015 - RNA, 25 nt, synthetic construct
  source 1..25: mol_type = other RNA
tggggcagaacacataattcccaga

SEQ ID NO: 1016 - RNA, 25 nt, synthetic construct
  source 1..25: mol_type = other RNA
atggggcagaacacataattcccag

SEQ ID NO: 1017 - RNA, 25 nt, synthetic construct
  source 1..25: mol_type = other RNA
gatggggcagaacacataattccca

SEQ ID NO: 1018 - RNA, 25 nt, synthetic construct
  source 1..25: mol_type = other RNA
tgatggggcagaacacataattccc

SEQ ID NO: 1019 - RNA, 25 nt, synthetic construct
  source 1..25: mol_type = other RNA
gtgatggggcagaacacataattcc

SEQ ID NO: 1020 - RNA, 25 nt, synthetic construct
  source 1..25: mol_type = other RNA
agtgatggggcagaacacataattc

SEQ ID NO: 1021 - RNA, 25 nt, synthetic construct
  source 1..25: mol_type = other RNA
gagtgatggggcagaacacataatt

SEQ ID NO: 1022 - RNA, 25 nt, synthetic construct
  source 1..25: mol_type = other RNA
agagtgatggggcagaacacataat

SEQ ID NO: 1023 - RNA, 25 nt, synthetic construct
  source 1..25: mol_type = other RNA
gagagtgatggggcagaacacataa

SEQ ID NO: 1024 - RNA, 25 nt, synthetic construct
  source 1..25: mol_type = other RNA
agagagtgatggggcagaacacata

SEQ ID NO: 1025 - RNA, 25 nt, synthetic construct
  source 1..25: mol_type = other RNA
gagagagtgatggggcagaacacat

SEQ ID NO: 1026 - RNA, 25 nt, synthetic construct
  source 1..25: mol_type = other RNA
agagagagtgatggggcagaacaca

SEQ ID NO: 1027 - RNA, 25 nt, synthetic construct
  source 1..25: mol_type = other RNA
aagagagagtgatggggcagaacac

SEQ ID NO: 1028 - RNA, 25 nt, synthetic construct
  source 1..25: mol_type = other RNA
taagagagagtgatggggcagaaca

SEQ ID NO: 1029 - RNA, 25 nt, synthetic construct
  source 1..25: mol_type = other RNA
ttaagagagagtgatggggcagaac

SEQ ID NO: 1030 - RNA, 25 nt, synthetic construct
  source 1..25: mol_type = other RNA
attaagagagagtgatggggcagaa

SEQ ID NO: 1031 - RNA, 25 nt, synthetic construct
  source 1..25: mol_type = other RNA
aattaagagagagtgatggggcaga

SEQ ID NO: 1032 - RNA, 25 nt, synthetic construct
  source 1..25: mol_type = other RNA
caattaagagagagtgatggggcag

SEQ ID NO: 1033 - RNA, 25 nt, synthetic construct
  source 1..25: mol_type = other RNA
ccaattaagagagagtgatggggca

SEQ ID NO: 1034 - RNA, 25 nt, synthetic construct
  source 1..25: mol_type = other RNA
tccaattaagagagagtgatggggc

SEQ ID NO: 1035 - RNA, 25 nt, synthetic construct
  source 1..25: mol_type = other RNA
atccaattaagagagagtgatgggg

SEQ ID NO: 1036 - RNA, 25 nt, synthetic construct
  source 1..25: mol_type = other RNA
aatccaattaagagagagtgatggg

SEQ ID NO: 1037 - RNA, 25 nt, synthetic construct
  source 1..25: mol_type = other RNA
aaatccaattaagagagagtgatgg

SEQ ID NO: 1038 - RNA, 25 nt, synthetic construct
  source 1..25: mol_type = other RNA
aaaatccaattaagagagagtgatg

SEQ ID NO: 1039 - RNA, 25 nt, synthetic construct
  source 1..25: mol_type = other RNA
aaaaatccaattaagagagagtgat

SEQ ID NO: 1040 - RNA, 25 nt, synthetic construct
  source 1..25: mol_type = other RNA
taaaaatccaattaagagagagtga

SEQ ID NO: 1041 - RNA, 25 nt, synthetic construct
  source 1..25: mol_type = other RNA
ttaaaaatccaattaagagagagtg

SEQ ID NO: 1042 - RNA, 25 nt, synthetic construct
  source 1..25: mol_type = other RNA
tttaaaaatccaattaagagagagt

SEQ ID NO: 1043 - RNA, 25 nt, synthetic construct
  source 1..25: mol_type = other RNA
ttttaaaaatccaattaagagagag

SEQ ID NO: 1044 - RNA, 25 nt, synthetic construct
  source 1..25: mol_type = other RNA
attttaaaaatccaattaagagaga

SEQ ID NO: 1045 - RNA, 25 nt, synthetic construct
  source 1..25: mol_type = other RNA
aattttaaaaatccaattaagagag

SEQ ID NO: 1046 - RNA, 25 nt, synthetic construct
  source 1..25: mol_type = other RNA
taattttaaaaatccaattaagaga

SEQ ID NO: 1047 - RNA, 25 nt, synthetic construct
  source 1..25: mol_type = other RNA
ataattttaaaaatccaattaagag

SEQ ID NO: 1048 - RNA, 25 nt, synthetic construct
  source 1..25: mol_type = other RNA
tataattttaaaaatccaattaaga

SEQ ID NO: 1049 - RNA, 25 nt, synthetic construct
  source 1..25: mol_type = other RNA
atataattttaaaaatccaattaag

SEQ ID NO: 1050 - RNA, 25 nt, synthetic construct
  source 1..25: mol_type = other RNA
aatataattttaaaaatccaattaa

SEQ ID NO: 1051 - RNA, 25 nt, synthetic construct
  source 1..25: mol_type = other RNA
gaatataattttaaaaatccaatta

SEQ ID NO: 1052 - RNA, 25 nt, synthetic construct
  source 1..25: mol_type = other RNA
tgaatataattttaaaaatccaatt

SEQ ID NO: 1053 - RNA, 25 nt, synthetic construct
  source 1..25: mol_type = other RNA
atgaatataattttaaaaatccaat

SEQ ID NO: 1054 - RNA, 25 nt, synthetic construct
  source 1..25: mol_type = other RNA
tatgaatataattttaaaaatccaa

SEQ ID NO: 1055 - RNA, 25 nt, synthetic construct
  source 1..25: mol_type = other RNA
atatgaatataattttaaaaatcca

SEQ ID NO: 1056 - RNA, 25 nt, synthetic construct
  source 1..25: mol_type = other RNA
aatatgaatataattttaaaaatcc

SEQ ID NO: 1057 - RNA, 25 nt, synthetic construct
  source 1..25: mol_type = other RNA
caatatgaatataattttaaaaatc

SEQ ID NO: 1058 - RNA, 25 nt, synthetic construct
  source 1..25: mol_type = other RNA
gcaatatgaatataattttaaaaat

SEQ ID NO: 1059 - RNA, 25 nt, synthetic construct
  source 1..25: mol_type = other RNA
tgcaatatgaatataattttaaaaa

SEQ ID NO: 1060 - RNA, 25 nt, synthetic construct
  source 1..25: mol_type = other RNA
ctgcaatatgaatataattttaaaa

SEQ ID NO: 1061 - RNA, 25 nt, synthetic construct
  source 1..25: mol_type = other RNA
cctgcaatatgaatataattttaaa

SEQ ID NO: 1062 - RNA, 25 nt, synthetic construct
  source 1..25: mol_type = other RNA
tcctgcaatatgaatataattttaa

SEQ ID NO: 1063 - RNA, 25 nt, synthetic construct
  source 1..25: mol_type = other RNA
gtcctgcaatatgaatataatttta

SEQ ID NO: 1064 - RNA, 25 nt, synthetic construct
  source 1..25: mol_type = other RNA
agtcctgcaatatgaatataatttt

SEQ ID NO: 1065 - RNA, 25 nt, synthetic construct
  source 1..25: mol_type = other RNA
gagtcctgcaatatgaatataattt

SEQ ID NO: 1066 - RNA, 25 nt, synthetic construct
  source 1..25: mol_type = other RNA
cgagtcctgcaatatgaatataatt

SEQ ID NO: 1067 - RNA, 25 nt, synthetic construct
  source 1..25: mol_type = other RNA
ccgagtcctgcaatatgaatataat

SEQ ID NO: 1068 - RNA, 25 nt, synthetic construct
  source 1..25: mol_type = other RNA
gccgagtcctgcaatatgaatataa

SEQ ID NO: 1069 - RNA, 25 nt, synthetic construct
  source 1..25: mol_type = other RNA
tgccgagtcctgcaatatgaatata

SEQ ID NO: 1070 - RNA, 25 nt, synthetic construct
  source 1..25: mol_type = other RNA
ctgccgagtcctgcaatatgaatat

SEQ ID NO: 1071 - RNA, 25 nt, synthetic construct
  source 1..25: mol_type = other RNA
tctgccgagtcctgcaatatgaata

SEQ ID NO: 1072 - RNA, 25 nt, synthetic construct
  source 1..25: mol_type = other RNA
ttctgccgagtcctgcaatatgaat

SEQ ID NO: 1073 - RNA, 25 nt, synthetic construct
  source 1..25: mol_type = other RNA
cttctgccgagtcctgcaatatgaa

SEQ ID NO: 1074 - RNA, 25 nt, synthetic construct
  source 1..25: mol_type = other RNA
tcttctgccgagtcctgcaatatga

SEQ ID NO: 1075 - RNA, 25 nt, synthetic construct
  source 1..25: mol_type = other RNA
gtcttctgccgagtcctgcaatatg

SEQ ID NO: 1076 - RNA, 25 nt, synthetic construct
  source 1..25: mol_type = other RNA
ggtcttctgccgagtcctgcaatat

SEQ ID NO: 1077 - RNA, 25 nt, synthetic construct
  source 1..25: mol_type = other RNA
aggtcttctgccgagtcctgcaata

SEQ ID NO: 1078 - RNA, 25 nt, synthetic construct
  source 1..25: mol_type = other RNA
aaggtcttctgccgagtcctgcaat

SEQ ID NO: 1079 - RNA, 25 nt, synthetic construct
  source 1..25: mol_type = other RNA
gaaggtcttctgccgagtcctgcaa

SEQ ID NO: 1080 - RNA, 25 nt, synthetic construct
  source 1..25: mol_type = other RNA
cgaaggtcttctgccgagtcctgca

SEQ ID NO: 1081 - RNA, 25 nt, synthetic construct
  source 1..25: mol_type = other RNA
tcgaaggtcttctgccgagtcctgc

SEQ ID NO: 1082 - RNA, 25 nt, synthetic construct
  source 1..25: mol_type = other RNA
ctcgaaggtcttctgccgagtcctg

SEQ ID NO: 1083 - RNA, 25 nt, synthetic construct
  source 1..25: mol_type = other RNA
tctcgaaggtcttctgccgagtcct

SEQ ID NO: 1084 - RNA, 25 nt, synthetic construct
  source 1..25: mol_type = other RNA
ctctcgaaggtcttctgccgagtcc

SEQ ID NO: 1085 - RNA, 25 nt, synthetic construct
  source 1..25: mol_type = other RNA
tctctcgaaggtcttctgccgagtc

SEQ ID NO: 1086 - RNA, 25 nt, synthetic construct
  source 1..25: mol_type = other RNA
ttctctcgaaggtcttctgccgagt

SEQ ID NO: 1087 - RNA, 25 nt, synthetic construct
  source 1..25: mol_type = other RNA
tttctctcgaaggtcttctgccgag

SEQ ID NO: 1088 - RNA, 25 nt, synthetic construct
  source 1..25: mol_type = other RNA
ctttctctcgaaggtcttctgccga

SEQ ID NO: 1089 - RNA, 25 nt, synthetic construct
  source 1..25: mol_type = other RNA
cctttctctcgaaggtcttctgccg

SEQ ID NO: 1090 - RNA, 25 nt, synthetic construct
  source 1..25: mol_type = other RNA
acctttctctcgaaggtcttctgcc

SEQ ID NO: 1091 - RNA, 25 nt, synthetic construct
  source 1..25: mol_type = other RNA
tacctttctctcgaaggtcttctgc

SEQ ID NO: 1092 - RNA, 25 nt, synthetic construct
  source 1..25: mol_type = other RNA
ctacctttctctcgaaggtcttctg

SEQ ID NO: 1093 - RNA, 25 nt, synthetic construct
  source 1..25: mol_type = other RNA
tctacctttctctcgaaggtcttct

SEQ ID NO: 1094 - RNA, 25 nt, synthetic construct
  source 1..25: mol_type = other RNA
ttctacctttctctcgaaggtcttc

SEQ ID NO: 1095 - RNA, 25 nt, synthetic construct
  source 1..25: mol_type = other RNA
tttctacctttctctcgaaggtctt

SEQ ID NO: 1096 - RNA, 25 nt, synthetic construct
  source 1..25: mol_type = other RNA
ttttctacctttctctcgaaggtct

SEQ ID NO: 1097 - RNA, 25 nt, synthetic construct
  source 1..25: mol_type = other RNA
attttctacctttctctcgaaggtc

SEQ ID NO: 1098 - RNA, 25 nt, synthetic construct
  source 1..25: mol_type = other RNA
tattttctacctttctctcgaaggt

SEQ ID NO: 1099 - RNA, 25 nt, synthetic construct
  source 1..25: mol_type = other RNA
ttattttctacctttctctcgaagg

SEQ ID NO: 1100 - RNA, 25 nt, synthetic construct
  source 1..25: mol_type = other RNA
cttattttctacctttctctcgaag

SEQ ID NO: 1101 - RNA, 25 nt, synthetic construct
  source 1..25: mol_type = other RNA
tcttattttctacctttctctcgaa

SEQ ID NO: 1102 - RNA, 25 nt, synthetic construct
  source 1..25: mol_type = other RNA
ttcttattttctacctttctctcga

SEQ ID NO: 1103 - RNA, 25 nt, synthetic construct
  source 1..25: mol_type = other RNA
attcttattttctacctttctctcg

SEQ ID NO: 1104 - RNA, 25 nt, synthetic construct
  source 1..25: mol_type = other RNA
aattcttattttctacctttctctc

SEQ ID NO: 1105 - RNA, 25 nt, synthetic construct
  source 1..25: mol_type = other RNA
aaattcttattttctacctttctct

SEQ ID NO: 1106 - RNA, 25 nt, synthetic construct
  source 1..25: mol_type = other RNA
caaattcttattttctacctttctc

SEQ ID NO: 1107 - RNA, 25 nt, synthetic construct
  source 1..25: mol_type = other RNA
ccaaattcttattttctacctttct

SEQ ID NO: 1108 - RNA, 25 nt, synthetic construct
  source 1..25: mol_type = other RNA
gccaaattcttattttctacctttc

SEQ ID NO: 1109 - RNA, 25 nt, synthetic construct
  source 1..25: mol_type = other RNA
agccaaattcttattttctaccttt

SEQ ID NO: 1110 - RNA, 25 nt, synthetic construct
  source 1..25: mol_type = other RNA
gagccaaattcttattttctacctt

SEQ ID NO: 1111 - RNA, 25 nt, synthetic construct
  source 1..25: mol_type = other RNA
agagccaaattcttattttctacct

SEQ ID NO: 1112 - RNA, 25 nt, synthetic construct
  source 1..25: mol_type = other RNA
gagagccaaattcttattttctacc

SEQ ID NO: 1113 - RNA, 25 nt, synthetic construct
  source 1..25: mol_type = other RNA
agagagccaaattcttattttctac

SEQ ID NO: 1114 - RNA, 25 nt, synthetic construct
  source 1..25: mol_type = other RNA
cagagagccaaattcttattttcta

SEQ ID NO: 1115 - RNA, 25 nt, synthetic construct
  source 1..25: mol_type = other RNA
acagagagccaaattcttattttct

SEQ ID NO: 1116 - RNA, 25 nt, synthetic construct
  source 1..25: mol_type = other RNA
cacagagagccaaattcttattttc

SEQ ID NO: 1117 - RNA, 25 nt, synthetic construct
  source 1..25: mol_type = other RNA
acacagagagccaaattcttatttt

SEQ ID NO: 1118 - RNA, 25 nt, synthetic construct
  source 1..25: mol_type = other RNA
cacacagagagccaaattcttattt

SEQ ID NO: 1119 - RNA, 25 nt, synthetic construct
  source 1..25: mol_type = other RNA
tcacacagagagccaaattcttatt

SEQ ID NO: 1120 - RNA, 25 nt, synthetic construct
  source 1..25: mol_type = other RNA
ctcacacagagagccaaattcttat

SEQ ID NO: 1121 - RNA, 25 nt, synthetic construct
  source 1..25: mol_type = other RNA
gctcacacagagagccaaattctta

SEQ ID NO: 1122 - RNA, 25 nt, synthetic construct
  source 1..25: mol_type = other RNA
tgctcacacagagagccaaattctt

SEQ ID NO: 1123 - RNA, 25 nt, synthetic construct
  source 1..25: mol_type = other RNA
atgctcacacagagagccaaattct

SEQ ID NO: 1124 - RNA, 25 nt, synthetic construct
  source 1..25: mol_type = other RNA
catgctcacacagagagccaaattc

SEQ ID NO: 1125 - RNA, 25 nt, synthetic construct
  source 1..25: mol_type = other RNA
acatgctcacacagagagccaaatt

SEQ ID NO: 1126 - RNA, 25 nt, synthetic construct
  source 1..25: mol_type = other RNA
cacatgctcacacagagagccaaat

SEQ ID NO: 1127 - RNA, 25 nt, synthetic construct
  source 1..25: mol_type = other RNA
acacatgctcacacagagagccaaa

SEQ ID NO: 1128 - RNA, 25 nt, synthetic construct
  source 1..25: mol_type = other RNA
cacacatgctcacacagagagccaa

SEQ ID NO: 1129 - RNA, 25 nt, synthetic construct
  source 1..25: mol_type = other RNA
gcacacatgctcacacagagagcca

SEQ ID NO: 1130 - RNA, 25 nt, synthetic construct
  source 1..25: mol_type = other RNA
cgcacacatgctcacacagagagcc

SEQ ID NO: 1131 - RNA, 25 nt, synthetic construct
  source 1..25: mol_type = other RNA
acgcacacatgctcacacagagagc

SEQ ID NO: 1132 - RNA, 25 nt, synthetic construct
  source 1..25: mol_type = other RNA
cacgcacacatgctcacacagagag

SEQ ID NO: 1133 - RNA, 25 nt, synthetic construct
  source 1..25: mol_type = other RNA
acacgcacacatgctcacacagaga

SEQ ID NO: 1134 - RNA, 25 nt, synthetic construct
  source 1..25: mol_type = other RNA
cacacgcacacatgctcacacagag

SEQ ID NO: 1135 - RNA, 25 nt, synthetic construct
  source 1..25: mol_type = other RNA
acacacgcacacatgctcacacaga

SEQ ID NO: 1136 - RNA, 25 nt, synthetic construct
  source 1..25: mol_type = other RNA
cacacacgcacacatgctcacacag

SEQ ID NO: 1137 - RNA, 25 nt, synthetic construct
  source 1..25: mol_type = other RNA
gcacacacgcacacatgctcacaca

SEQ ID NO: 1138 - RNA, 25 nt, synthetic construct
  source 1..25: mol_type = other RNA
cgcacacacgcacacatgctcacac

SEQ ID NO: 1139 - RNA, 25 nt, synthetic construct
  source 1..25: mol_type = other RNA
tcgcacacacgcacacatgctcaca

SEQ ID NO: 1140 - RNA, 25 nt, synthetic construct
  source 1..25: mol_type = other RNA
ctcgcacacacgcacacatgctcac

SEQ ID NO: 1141 - RNA, 25 nt, synthetic construct
  source 1..25: mol_type = other RNA
tctcgcacacacgcacacatgctca

SEQ ID NO: 1142 - RNA, 25 nt, synthetic construct
  source 1..25: mol_type = other RNA
ctctcgcacacacgcacacatgctc

SEQ ID NO: 1143 - RNA, 25 nt, synthetic construct
  source 1..25: mol_type = other RNA
tctctcgcacacacgcacacatgct

SEQ ID NO: 1144 - RNA, 25 nt, synthetic construct
  source 1..25: mol_type = other RNA
ctctctcgcacacacgcacacatgc

SEQ ID NO: 1145 - RNA, 25 nt, synthetic construct
  source 1..25: mol_type = other RNA
tctctctcgcacacacgcacacatg

SEQ ID NO: 1146 - RNA, 25 nt, synthetic construct
  source 1..25: mol_type = other RNA
ctctctctcgcacacacgcacacat

SEQ ID NO: 1147 - RNA, 25 nt, synthetic construct
  source 1..25: mol_type = other RNA
tctctctctcgcacacacgcacaca

SEQ ID NO: 1148 - RNA, 25 nt, synthetic construct
  source 1..25: mol_type = other RNA
ctctctctctcgcacacacgcacac

SEQ ID NO: 1149 - RNA, 25 nt, synthetic construct
  source 1..25: mol_type = other RNA
tctctctctctcgcacacacgcaca

SEQ ID NO: 1150 - RNA, 25 nt, synthetic construct
  source 1..25: mol_type = other RNA
gtctctctctctcgcacacacgcac

SEQ ID NO: 1151 - RNA, 25 nt, synthetic construct
  source 1..25: mol_type = other RNA
tgtctctctctctcgcacacacgca

SEQ ID NO: 1152 - RNA, 25 nt, synthetic construct
  source 1..25: mol_type = other RNA
ctgtctctctctctcgcacacacgc

SEQ ID NO: 1153 - RNA, 25 nt, synthetic construct
  source 1..25: mol_type = other RNA
tctgtctctctctctcgcacacacg

SEQ ID NO: 1154 - RNA, 25 nt, synthetic construct
  source 1..25: mol_type = other RNA
gtctgtctctctctctcgcacacac

SEQ ID NO: 1155 - RNA, 25 nt, synthetic construct
  source 1..25: mol_type = other RNA
tgtctgtctctctctctcgcacaca

SEQ ID NO: 1156 - RNA, 25 nt, synthetic construct
  source 1..25: mol_type = other RNA
ctgtctgtctctctctctcgcacac

SEQ ID NO: 1157 - RNA, 25 nt, synthetic construct
  source 1..25: mol_type = other RNA
gctgtctgtctctctctctcgcaca

SEQ ID NO: 1158 - RNA, 25 nt, synthetic construct
  source 1..25: mol_type = other RNA
ggctgtctgtctctctctctcgcac

SEQ ID NO: 1159 - RNA, 25 nt, synthetic construct
  source 1..25: mol_type = other RNA
aggctgtctgtctctctctctcgca

SEQ ID NO: 1160 - RNA, 25 nt, synthetic construct
  source 1..25: mol_type = other RNA
caggctgtctgtctctctctctcgc

SEQ ID NO: 1161 - RNA, 25 nt, synthetic construct
  source 1..25: mol_type = other RNA
gcaggctgtctgtctctctctctcg

SEQ ID NO: 1162 - RNA, 25 nt, synthetic construct
  source 1..25: mol_type = other RNA
ggcaggctgtctgtctctctctctc

SEQ ID NO: 1163 - RNA, 25 nt, synthetic construct
  source 1..25: mol_type = other RNA
aggcaggctgtctgtctctctctct

SEQ ID NO: 1164 - RNA, 25 nt, synthetic construct
  source 1..25: mol_type = other RNA
taggcaggctgtctgtctctctctc

SEQ ID NO: 1165 - RNA, 25 nt, synthetic construct
  source 1..25: mol_type = other RNA
ttaggcaggctgtctgtctctctct

SEQ ID NO: 1166 - RNA, 25 nt, synthetic construct
  source 1..25: mol_type = other RNA
cttaggcaggctgtctgtctctctc

SEQ ID NO: 1167 - RNA, 25 nt, synthetic construct
  source 1..25: mol_type = other RNA
tcttaggcaggctgtctgtctctct

SEQ ID NO: 1168 - RNA, 25 nt, synthetic construct
  source 1..25: mol_type = other RNA
ttcttaggcaggctgtctgtctctc

SEQ ID NO: 1169 - RNA, 25 nt, synthetic construct
  source 1..25: mol_type = other RNA
cttcttaggcaggctgtctgtctct

SEQ ID NO: 1170 - RNA, 25 nt, synthetic construct
  source 1..25: mol_type = other RNA
tcttcttaggcaggctgtctgtctc

SEQ ID NO: 1171 - RNA, 25 nt, synthetic construct
  source 1..25: mol_type = other RNA
ttcttcttaggcaggctgtctgtct

SEQ ID NO: 1172 - RNA, 25 nt, synthetic construct
  source 1..25: mol_type = other RNA
tttcttcttaggcaggctgtctgtc

SEQ ID NO: 1173 - RNA, 25 nt, synthetic construct
  source 1..25: mol_type = other RNA
atttcttcttaggcaggctgtctgt

SEQ ID NO: 1174 - RNA, 25 nt, synthetic construct
  source 1..25: mol_type = other RNA
catttcttcttaggcaggctgtctg

SEQ ID NO: 1175 - RNA, 25 nt, synthetic construct
  source 1..25: mol_type = other RNA
tcatttcttcttaggcaggctgtct

SEQ ID NO: 1176 - RNA, 25 nt, synthetic construct
  source 1..25: mol_type = other RNA
ttcatttcttcttaggcaggctgtc

SEQ ID NO: 1177 - RNA, 25 nt, synthetic construct
  source 1..25: mol_type = other RNA
attcatttcttcttaggcaggctgt

SEQ ID NO: 1178 - RNA, 25 nt, synthetic construct
  source 1..25: mol_type = other RNA
cattcatttcttcttaggcaggctg

SEQ ID NO: 1179 - RNA, 25 nt, synthetic construct
  source 1..25: mol_type = other RNA
acattcatttcttcttaggcaggct

SEQ ID NO: 1180 - RNA, 25 nt, synthetic construct
  source 1..25: mol_type = other RNA
cacattcatttcttcttaggcaggc

SEQ ID NO: 1181 - RNA, 25 nt, synthetic construct
  source 1..25: mol_type = other RNA
tcacattcatttcttcttaggcagg

SEQ ID NO: 1182 - RNA, 25 nt, synthetic construct
  source 1..25: mol_type = other RNA
ttcacattcatttcttcttaggcag

SEQ ID NO: 1183 - RNA, 25 nt, synthetic construct
  source 1..25: mol_type = other RNA
attcacattcatttcttcttaggca

SEQ ID NO: 1184 - RNA, 25 nt, synthetic construct
  source 1..25: mol_type = other RNA
cattcacattcatttcttcttaggc

SEQ ID NO: 1185 - RNA, 25 nt, synthetic construct
  source 1..25: mol_type = other RNA
gcattcacattcatttcttcttagg

SEQ ID NO: 1186 - RNA, 25 nt, synthetic construct
  source 1..25: mol_type = other RNA
cgcattcacattcatttcttcttag

SEQ ID NO: 1187 - RNA, 25 nt, synthetic construct
  source 1..25: mol_type = other RNA
ccgcattcacattcatttcttctta

SEQ ID NO: 1188 - RNA, 25 nt, synthetic construct
  source 1..25: mol_type = other RNA
gccgcattcacattcatttcttctt

SEQ ID NO: 1189 - RNA, 25 nt, synthetic construct
  source 1..25: mol_type = other RNA
agccgcattcacattcatttcttct

SEQ ID NO: 1190 - RNA, 25 nt, synthetic construct
  source 1..25: mol_type = other RNA
aagccgcattcacattcatttcttc

SEQ ID NO: 1191 - RNA, 25 nt, synthetic construct
  source 1..25: mol_type = other RNA
caagccgcattcacattcatttctt

SEQ ID NO: 1192 - RNA, 25 nt, synthetic construct
  source 1..25: mol_type = other RNA
acaagccgcattcacattcatttct

SEQ ID NO: 1193 - RNA, 25 nt, synthetic construct
  source 1..25: mol_type = other RNA
cacaagccgcattcacattcatttc

SEQ ID NO: 1194 - RNA, 25 nt, synthetic construct
  source 1..25: mol_type = other RNA
ccacaagccgcattcacattcattt

SEQ ID NO: 1195 - RNA, 25 nt, synthetic construct
  source 1..25: mol_type = other RNA
gccacaagccgcattcacattcatt

SEQ ID NO: 1196 - RNA, 25 nt, synthetic construct
  source 1..25: mol_type = other RNA
tgccacaagccgcattcacattcat

SEQ ID NO: 1197 - RNA, 25 nt, synthetic construct
  source 1..25: mol_type = other RNA
gtgccacaagccgcattcacattca

SEQ ID NO: 1198 - RNA, 25 nt, synthetic construct
  source 1..25: mol_type = other RNA
tgtgccacaagccgcattcacattc

SEQ ID NO: 1199 - RNA, 25 nt, synthetic construct
  source 1..25: mol_type = other RNA
ctgtgccacaagccgcattcacatt

SEQ ID NO: 1200 - RNA, 25 nt, synthetic construct
  source 1..25: mol_type = other RNA
actgtgccacaagccgcattcacat

SEQ ID NO: 1201 - RNA, 25 nt, synthetic construct
  source 1..25: mol_type = other RNA
aactgtgccacaagccgcattcaca

SEQ ID NO: 1202 - RNA, 25 nt, synthetic construct
  source 1..25: mol_type = other RNA
caactgtgccacaagccgcattcac

SEQ ID NO: 1203 - RNA, 25 nt, synthetic construct
  source 1..25: mol_type = other RNA
tcaactgtgccacaagccgcattca

SEQ ID NO: 1204 - RNA, 25 nt, synthetic construct
  source 1..25: mol_type = other RNA
gtcaactgtgccacaagccgcattc

SEQ ID NO: 1205 - RNA, 25 nt, synthetic construct
  source 1..25: mol_type = other RNA
tgtcaactgtgccacaagccgcatt

SEQ ID NO: 1206 - RNA, 25 nt, synthetic construct
  source 1..25: mol_type = other RNA
ttgtcaactgtgccacaagccgcat

SEQ ID NO: 1207 - RNA, 25 nt, synthetic construct
  source 1..25: mol_type = other RNA
cttgtcaactgtgccacaagccgca

SEQ ID NO: 1208 - RNA, 25 nt, synthetic construct
  source 1..25: mol_type = other RNA
ccttgtcaactgtgccacaagccgc

SEQ ID NO: 1209 - RNA, 25 nt, synthetic construct
  source 1..25: mol_type = other RNA
tccttgtcaactgtgccacaagccg

SEQ ID NO: 1210 - RNA, 25 nt, synthetic construct
  source 1..25: mol_type = other RNA
atccttgtcaactgtgccacaagcc

SEQ ID NO: 1211 - RNA, 25 nt, synthetic construct
  source 1..25: mol_type = other RNA
catccttgtcaactgtgccacaagc

SEQ ID NO: 1212 - RNA, 25 nt, synthetic construct
  source 1..25: mol_type = other RNA
tcatccttgtcaactgtgccacaag

SEQ ID NO: 1213 - RNA, 25 nt, synthetic construct
  source 1..25: mol_type = other RNA
atcatccttgtcaactgtgccacaa

SEQ ID NO: 1214 - RNA, 25 nt, synthetic construct
  source 1..25: mol_type = other RNA
tatcatccttgtcaactgtgccaca

SEQ ID NO: 1215 - RNA, 25 nt, synthetic construct
  source 1..25: mol_type = other RNA
ttatcatccttgtcaactgtgccac

SEQ ID NO: 1216 - RNA, 25 nt, synthetic construct
  source 1..25: mol_type = other RNA
tttatcatccttgtcaactgtgcca

SEQ ID NO: 1217 - RNA, 25 nt, synthetic construct
  source 1..25: mol_type = other RNA
atttatcatccttgtcaactgtgcc

SEQ ID NO: 1218 - RNA, 25 nt, synthetic construct
  source 1..25: mol_type = other RNA
gatttatcatccttgtcaactgtgc

SEQ ID NO: 1219 - RNA, 25 nt, synthetic construct
  source 1..25: mol_type = other RNA
tgatttatcatccttgtcaactgtg

SEQ ID NO: 1220 - RNA, 25 nt, synthetic construct
  source 1..25: mol_type = other RNA
ttgatttatcatccttgtcaactgt

SEQ ID NO: 1221 - RNA, 25 nt, synthetic construct
  source 1..25: mol_type = other RNA
attgatttatcatccttgtcaactg

SEQ ID NO: 1222 - RNA, 25 nt, synthetic construct
  source 1..25: mol_type = other RNA
tattgatttatcatccttgtcaact

SEQ ID NO: 1223 - RNA, 25 nt, synthetic construct
  source 1..25: mol_type = other RNA
ttattgatttatcatccttgtcaac

SEQ ID NO: 1224 - RNA, 25 nt, synthetic construct
  source 1..25: mol_type = other RNA
attattgatttatcatccttgtcaa

SEQ ID NO: 1225 - RNA, 25 nt, synthetic construct
  source 1..25: mol_type = other RNA
cattattgatttatcatccttgtca

SEQ ID NO: 1226 - RNA, 25 nt, synthetic construct
  source 1..25: mol_type = other RNA
gcattattgatttatcatccttgtc

SEQ ID NO: 1227 - RNA, 25 nt, synthetic construct
  source 1..25: mol_type = other RNA
tgcattattgatttatcatccttgt

SEQ ID NO: 1228 - RNA, 25 nt, synthetic construct
  source 1..25: mol_type = other RNA
ttgcattattgatttatcatccttg

SEQ ID NO: 1229 - RNA, 25 nt, synthetic construct
  source 1..25: mol_type = other RNA
cttgcattattgatttatcatcctt

SEQ ID NO: 1230 - RNA, 25 nt, synthetic construct
  source 1..25: mol_type = other RNA
gcttgcattattgatttatcatcct

SEQ ID NO: 1231 - RNA, 25 nt, synthetic construct
  source 1..25: mol_type = other RNA
agcttgcattattgatttatcatcc

SEQ ID NO: 1232 - RNA, 25 nt, synthetic construct
  source 1..25: mol_type = other RNA
aagcttgcattattgatttatcatc

SEQ ID NO: 1233 - RNA, 25 nt, synthetic construct
  source 1..25: mol_type = other RNA
taagcttgcattattgatttatcat

SEQ ID NO: 1234 - RNA, 25 nt, synthetic construct
  source 1..25: mol_type = other RNA
gtaagcttgcattattgatttatca

SEQ ID NO: 1235 - RNA, 25 nt, synthetic construct
  source 1..25: mol_type = other RNA
agtaagcttgcattattgatttatc

SEQ ID NO: 1236 - RNA, 25 nt, synthetic construct
  source 1..25: mol_type = other RNA
tagtaagcttgcattattgatttat

SEQ ID NO: 1237 - RNA, 25 nt, synthetic construct
  source 1..25: mol_type = other RNA
atagtaagcttgcattattgattta

SEQ ID NO: 1238 - RNA, 25 nt, synthetic construct
  source 1..25: mol_type = other RNA
gatagtaagcttgcattattgattt

SEQ ID NO: 1239 - RNA, 25 nt, synthetic construct
  source 1..25: mol_type = other RNA
tgatagtaagcttgcattattgatt

SEQ ID NO: 1240 - RNA, 25 nt, synthetic construct
  source 1..25: mol_type = other RNA
atgatagtaagcttgcattattgat

SEQ ID NO: 1241 - RNA, 25 nt, synthetic construct
  source 1..25: mol_type = other RNA
aatgatagtaagcttgcattattga

SEQ ID NO: 1242 - RNA, 25 nt, synthetic construct
  source 1..25: mol_type = other RNA
aaatgatagtaagcttgcattattg

SEQ ID NO: 1243 - RNA, 25 nt, synthetic construct
  source 1..25: mol_type = other RNA
taaatgatagtaagcttgcattatt

SEQ ID NO: 1244 - RNA, 25 nt, synthetic construct
  source 1..25: mol_type = other RNA
ataaatgatagtaagcttgcattat

SEQ ID NO: 1245 - RNA, 25 nt, synthetic construct
  source 1..25: mol_type = other RNA
cataaatgatagtaagcttgcatta

SEQ ID NO: 1246 - RNA, 25 nt, synthetic construct
  source 1..25: mol_type = other RNA
tcataaatgatagtaagcttgcatt

SEQ ID NO: 1247 - RNA, 25 nt, synthetic construct
  source 1..25: mol_type = other RNA
ttcataaatgatagtaagcttgcat

SEQ ID NO: 1248 - RNA, 25 nt, synthetic construct
  source 1..25: mol_type = other RNA
attcataaatgatagtaagcttgca

SEQ ID NO: 1249 - RNA, 25 nt, synthetic construct
  source 1..25: mol_type = other RNA
tattcataaatgatagtaagcttgc

SEQ ID NO: 1250 - RNA, 25 nt, synthetic construct
  source 1..25: mol_type = other RNA
ctattcataaatgatagtaagcttg

SEQ ID NO: 1251 - RNA, 25 nt, synthetic construct
  source 1..25: mol_type = other RNA
gctattcataaatgatagtaagctt

SEQ ID NO: 1252 - RNA, 25 nt, synthetic construct
  source 1..25: mol_type = other RNA
tgctattcataaatgatagtaagct

SEQ ID NO: 1253 - RNA, 25 nt, synthetic construct
  source 1..25: mol_type = other RNA
ttgctattcataaatgatagtaagc

SEQ ID NO: 1254 - RNA, 25 nt, synthetic construct
  source 1..25: mol_type = other RNA
attgctattcataaatgatagtaag

SEQ ID NO: 1255 - RNA, 25 nt, synthetic construct
  source 1..25: mol_type = other RNA
tattgctattcataaatgatagtaa

SEQ ID NO: 1256 - RNA, 25 nt, synthetic construct
  source 1..25: mol_type = other RNA
gtattgctattcataaatgatagta

SEQ ID NO: 1257 - RNA, 25 nt, synthetic construct
  source 1..25: mol_type = other RNA
agtattgctattcataaatgatagt

SEQ ID NO: 1258 - RNA, 25 nt, synthetic construct
  source 1..25: mol_type = other RNA
cagtattgctattcataaatgatag

SEQ ID NO: 1259 - RNA, 25 nt, synthetic construct
  source 1..25: mol_type = other RNA
tcagtattgctattcataaatgata

SEQ ID NO: 1260 - RNA, 25 nt, synthetic construct
  source 1..25: mol_type = other RNA
ttcagtattgctattcataaatgat

SEQ ID NO: 1261 - RNA, 25 nt, synthetic construct
  source 1..25: mol_type = other RNA
cttcagtattgctattcataaatga

SEQ ID NO: 1262 - RNA, 25 nt, synthetic construct
  source 1..25: mol_type = other RNA
tcttcagtattgctattcataaatg

SEQ ID NO: 1263 - RNA, 25 nt, synthetic construct
  source 1..25: mol_type = other RNA
ttcttcagtattgctattcataaat

SEQ ID NO: 1264 - RNA, 25 nt, synthetic construct
  source 1..25: mol_type = other RNA
tttcttcagtattgctattcataaa

SEQ ID NO: 1265 - RNA, 25 nt, synthetic construct
  source 1..25: mol_type = other RNA
atttcttcagtattgctattcataa

SEQ ID NO: 1266 - RNA, 25 nt, synthetic construct
  source 1..25: mol_type = other RNA
aatttcttcagtattgctattcata

SEQ ID NO: 1267 - RNA, 25 nt, synthetic construct
  source 1..25: mol_type = other RNA
taatttcttcagtattgctattcat

SEQ ID NO: 1268 - RNA, 25 nt, synthetic construct
  source 1..25: mol_type = other RNA
ttaatttcttcagtattgctattca

SEQ ID NO: 1269 - RNA, 25 nt, synthetic construct
  source 1..25: mol_type = other RNA
tttaatttcttcagtattgctattc

SEQ ID NO: 1270 - RNA, 25 nt, synthetic construct
  source 1..25: mol_type = other RNA
ttttaatttcttcagtattgctatt

SEQ ID NO: 1271 - RNA, 25 nt, synthetic construct
  source 1..25: mol_type = other RNA
gttttaatttcttcagtattgctat

SEQ ID NO: 1272 - RNA, 25 nt, synthetic construct
  source 1..25: mol_type = other RNA
tgttttaatttcttcagtattgcta

SEQ ID NO: 1273 - RNA, 25 nt, synthetic construct
  source 1..25: mol_type = other RNA
ttgttttaatttcttcagtattgct

SEQ ID NO: 1274 - RNA, 25 nt, synthetic construct
  source 1..25: mol_type = other RNA
tttgttttaatttcttcagtattgc

SEQ ID NO: 1275 - RNA, 25 nt, synthetic construct
  source 1..25: mol_type = other RNA
ttttgttttaatttcttcagtattg

SEQ ID NO: 1276 - RNA, 25 nt, synthetic construct
  source 1..25: mol_type = other RNA
cttttgttttaatttcttcagtatt

SEQ ID NO: 1277 - RNA, 25 nt, synthetic construct
  source 1..25: mol_type = other RNA
tcttttgttttaatttcttcagtat

SEQ ID NO: 1278 - RNA, 25 nt, synthetic construct
  source 1..25: mol_type = other RNA
atcttttgttttaatttcttcagta

SEQ ID NO: 1279 - RNA, 25 nt, synthetic construct
  source 1..25: mol_type = other RNA
aatcttttgttttaatttcttcagt

SEQ ID NO: 1280 - RNA, 25 nt, synthetic construct
  source 1..25: mol_type = other RNA
caatcttttgttttaatttcttcag

SEQ ID NO: 1281 - RNA, 25 nt, synthetic construct
  source 1..25: mol_type = other RNA
gcaatcttttgttttaatttcttca

SEQ ID NO: 1282 - RNA, 25 nt, synthetic construct
  source 1..25: mol_type = other RNA
agcaatcttttgttttaatttcttc

SEQ ID NO: 1283 - RNA, 25 nt, synthetic construct
  source 1..25: mol_type = other RNA
cagcaatcttttgttttaatttctt

SEQ ID NO: 1284 - RNA, 25 nt, synthetic construct
  source 1..25: mol_type = other RNA
acagcaatcttttgttttaatttct

SEQ ID NO: 1285 - RNA, 25 nt, synthetic construct
  source 1..25: mol_type = other RNA
gacagcaatcttttgttttaatttc

SEQ ID NO: 1286 - RNA, 25 nt, synthetic construct
  source 1..25: mol_type = other RNA
agacagcaatcttttgttttaattt

SEQ ID NO: 1287 - RNA, 25 nt, synthetic construct
  source 1..25: mol_type = other RNA
gagacagcaatcttttgttttaatt

SEQ ID NO: 1288 - RNA, 25 nt, synthetic construct
  source 1..25: mol_type = other RNA
tgagacagcaatcttttgttttaat

SEQ ID NO: 1289 - RNA, 25 nt, synthetic construct
  source 1..25: mol_type = other RNA
ttgagacagcaatcttttgttttaa

SEQ ID NO: 1290 - RNA, 25 nt, synthetic construct
  source 1..25: mol_type = other RNA
attgagacagcaatcttttgtttta

SEQ ID NO: 1291 - RNA, 25 nt, synthetic construct
  source 1..25: mol_type = other RNA
tattgagacagcaatcttttgtttt

SEQ ID NO: 1292 - RNA, 25 nt, synthetic construct
  source 1..25: mol_type = other RNA
atattgagacagcaatcttttgttt

SEQ ID NO: 1293 - RNA, 25 nt, synthetic construct
  source 1..25: mol_type = other RNA
tatattgagacagcaatcttttgtt

SEQ ID NO: 1294 - RNA, 25 nt, synthetic construct
  source 1..25: mol_type = other RNA
atatattgagacagcaatcttttgt

SEQ ID NO: 1295 - RNA, 25 nt, synthetic construct
  source 1..25: mol_type = other RNA
gatatattgagacagcaatcttttg

SEQ ID NO: 1296 - RNA, 25 nt, synthetic construct
  source 1..25: mol_type = other RNA
agatatattgagacagcaatctttt

SEQ ID NO: 1297 - RNA, 25 nt, synthetic construct
  source 1..25: mol_type = other RNA
aagatatattgagacagcaatcttt

SEQ ID NO: 1298 - RNA, 25 nt, synthetic construct
  source 1..25: mol_type = other RNA
taagatatattgagacagcaatctt

SEQ ID NO: 1299 - RNA, 25 nt, synthetic construct
  source 1..25: mol_type = other RNA
ataagatatattgagacagcaatct

SEQ ID NO: 1300 - RNA, 25 nt, synthetic construct
  source 1..25: mol_type = other RNA
tataagatatattgagacagcaatc

SEQ ID NO: 1301 - RNA, 25 nt, synthetic construct
  source 1..25: mol_type = other RNA
atataagatatattgagacagcaat

SEQ ID NO: 1302 - RNA, 25 nt, synthetic construct
  source 1..25: mol_type = other RNA
aatataagatatattgagacagcaa

SEQ ID NO: 1303 - RNA, 25 nt, synthetic construct
  source 1..25: mol_type = other RNA
aaatataagatatattgagacagca

SEQ ID NO: 1304 - RNA, 25 nt, synthetic construct
  source 1..25: mol_type = other RNA
taaatataagatatattgagacagc

SEQ ID NO: 1305 - RNA, 25 nt, synthetic construct
  source 1..25: mol_type = other RNA
ataaatataagatatattgagacag

SEQ ID NO: 1306 - RNA, 25 nt, synthetic construct
  source 1..25: mol_type = other RNA
aataaatataagatatattgagaca

SEQ ID NO: 1307 - RNA, 25 nt, synthetic construct
  source 1..25: mol_type = other RNA
taataaatataagatatattgagac

SEQ ID NO: 1308 - RNA, 25 nt, synthetic construct
  source 1..25: mol_type = other RNA
ataataaatataagatatattgaga

SEQ ID NO: 1309 - RNA, 25 nt, synthetic construct
  source 1..25: mol_type = other RNA
aataataaatataagatatattgag

SEQ ID NO: 1310 - RNA, 25 nt, synthetic construct
  source 1..25: mol_type = other RNA
aaataataaatataagatatattga

SEQ ID NO: 1311 - RNA, 25 nt, synthetic construct
  source 1..25: mol_type = other RNA
taaataataaatataagatatattg

SEQ ID NO: 1312 - RNA, 25 nt, synthetic construct
  source 1..25: mol_type = other RNA
gtaaataataaatataagatatatt

SEQ ID NO: 1313 - RNA, 25 nt, synthetic construct
  source 1..25: mol_type = other RNA
ggtaaataataaatataagatatat

SEQ ID NO: 1314 - RNA, 25 nt, synthetic construct
  source 1..25: mol_type = other RNA
tggtaaataataaatataagatata

SEQ ID NO: 1315 - RNA, 25 nt, synthetic construct
  source 1..25: mol_type = other RNA
ttggtaaataataaatataagatat

SEQ ID NO: 1316 - RNA, 25 nt, synthetic construct
  source 1..25: mol_type = other RNA
tttggtaaataataaatataagata

SEQ ID NO: 1317 - RNA, 25 nt, synthetic construct
  source 1..25: mol_type = other RNA
atttggtaaataataaatataagat

SEQ ID NO: 1318 - RNA, 25 nt, synthetic construct
  source 1..25: mol_type = other RNA
aatttggtaaataataaatataaga

SEQ ID NO: 1319 - RNA, 25 nt, synthetic construct
  source 1..25: mol_type = other RNA
taatttggtaaataataaatataag

SEQ ID NO: 1320 - RNA, 25 nt, synthetic construct
  source 1..25: mol_type = other RNA
ataatttggtaaataataaatataa

SEQ ID NO: 1321 - RNA, 25 nt, synthetic construct
  source 1..25: mol_type = other RNA
aataatttggtaaataataaatata

SEQ ID NO: 1322 - RNA, 25 nt, synthetic construct
  source 1..25: mol_type = other RNA
gaataatttggtaaataataaatat

SEQ ID NO: 1323 - RNA, 25 nt, synthetic construct
  source 1..25: mol_type = other RNA
agaataatttggtaaataataaata

SEQ ID NO: 1324 - RNA, 25 nt, synthetic construct
  source 1..25: mol_type = other RNA
tagaataatttggtaaataataaat

SEQ ID NO: 1325 - RNA, 25 nt, synthetic construct
  source 1..25: mol_type = other RNA
ttagaataatttggtaaataataaa

SEQ ID NO: 1326 - RNA, 25 nt, synthetic construct
  source 1..25: mol_type = other RNA
cttagaataatttggtaaataataa

SEQ ID NO: 1327 - RNA, 25 nt, synthetic construct
  source 1..25: mol_type = other RNA
tcttagaataatttggtaaataata

SEQ ID NO: 1328 - RNA, 25 nt, synthetic construct
  source 1..25: mol_type = other RNA
ctcttagaataatttggtaaataat

SEQ ID NO: 1329 - RNA, 25 nt, synthetic construct
  source 1..25: mol_type = other RNA
actcttagaataatttggtaaataa

SEQ ID NO: 1330 - RNA, 25 nt, synthetic construct
  source 1..25: mol_type = other RNA
tactcttagaataatttggtaaata

SEQ ID NO: 1331 - RNA, 25 nt, synthetic construct
  source 1..25: mol_type = other RNA
atactcttagaataatttggtaaat

SEQ ID NO: 1332 - RNA, 25 nt, synthetic construct
  source 1..25: mol_type = other RNA
aatactcttagaataatttggtaaa

SEQ ID NO: 1333 - RNA, 25 nt, synthetic construct
  source 1..25: mol_type = other RNA
aaatactcttagaataatttggtaa

SEQ ID NO: 1334 - RNA, 25 nt, synthetic construct
  source 1..25: mol_type = other RNA
gaaatactcttagaataatttggta

SEQ ID NO: 1335 - RNA, 25 nt, synthetic construct
  source 1..25: mol_type = other RNA
agaaatactcttagaataatttggt

SEQ ID NO: 1336 - RNA, 25 nt, synthetic construct
  source 1..25: mol_type = other RNA
aagaaatactcttagaataatttgg

SEQ ID NO: 1337 - RNA, 25 nt, synthetic construct
  source 1..25: mol_type = other RNA
gaagaaatactcttagaataatttg

SEQ ID NO: 1338 - RNA, 25 nt, synthetic construct
  source 1..25: mol_type = other RNA
ggaagaaatactcttagaataattt

SEQ ID NO: 1339 - DNA, 470 bp, Homo sapiens
  source 1..470: mol_type = genomic DNA
acttgtaatatacaggtatccctcctggtaagctctggtattatgtcttaacatttttaaatctatggtaatctttacaaaatattttacttccgaactcatatacctggggattttattactctgggaattatgtgttctgccccatcactctctcttaattggatttttaaaattatattcatattgcaggactcggcagaagaccttcgagagaaaggtagaaaataagaatttggctctctgtgtgagcatgtgtgcgtgtgtgcgagagagagagacagacagcctgcctaagaagaaatgaatgtgaatgcggcttgtggcacagttgacaaggatgataaatcaataatgcaagcttactatcatttatgaatagcaatactgaagaaattaaaacaaaagattgctgtctcaatatatcttatatttattatttaccaaattattctaagagtatttcttcc

SEQ ID NO: 1340 - DNA, 227 bp, Homo sapiens
  source 1..227: mol_type = genomic DNA
gactcggcagaagaccttcgagagaaaggtagaaaataagaatttggctctctgtgtgagcatgtgtgcgtgtgtgcgagagagagagacagacagcctgcctaagaagaaatgaatgtgaatgcggcttgtggcacagttgacaaggatgataaatcaataatgcaagcttactatcatttatgaatagcaatactgaagaaattaaaacaaaagattgctgtctc

SEQ ID NO: 1341 - DNA, 55361 bp, Homo sapiens
  source 1..55361: mol_type = genomic DNA
agctcctaggaagcttcagggcttaaagctccactctacttggactgtactatcaggcccccaaaatggggggagccgacagggaaggactgatttccatttcaaactgcattctggtactttgtactccagcaccattggccgatcaatatttaatgcttggagattctgactctgcgggagtcatgtcaggggaccttgggagccaatctgcttgagcttctgagtgataattattcatgggctcctgcctcttgctctttctctagcacggtcccactctgcagactcagtgccttattcagtcttctctctcgctctctccgctgctgtagccggaccctttgccttcgccactgctcagcgtctgcacatccctacaatggctaaaacagcaatggtaaggcactgcgcctcgttctccgtcggctctacctggagcccacctctcacctcctctcttgagctctagaagcattcagagatattttataaagaaaaagatgttaatggtaacacaggaccaggaaggacagggcagttctgggggaggtgggagggcagagaagaggtctatggaaatctaaagcgaagaatttcttttaaaaggtagaagcgggtaagttgccctcctatgggtagagaatttattctgtttccatatttaaaattaggactcaatcgtgaggggaggaagctaccttaactgtttgccttaaatgggcttaagggacattttggaaagtgctttataacgaccttttttttttttatttcttctctagtttaagaagaaaataggaaaggggtaaagggaaggtgggagaaaggaaaaagaaaattgcaaagtcaaagcggtcccatcccgctgtttgaaagatgggtggagacggggggaggggatggagagaactgggcacattttacggtattgtctcgtcgaagaaaccgctagtcctggggtgcggtgcagggaggtaagacggcgggggacagggtgggggtaggacctccgctcctttgttttagggcaagggaggggaaggagagaggaagtcgcggagggcgtggagggcgcgggtgggcagctgcaggggcggggaagcgcgcggcagggaggggtggagggacagcggcttcgaaggcgctggggtggggtttctttgtgtgcggaccagcggtcccggggggaggcacctgcagcgctgggcgcacaatgcggacagccccacccagtgcggaaccgcgcagccccgcccccccgcccggtgctgcatcttcattcgaaagggggtcgggtggggagcgcagcgtgacacccaggagcccaaccctgcggggacagcggcgccacgccccgcgctccccgctcccgactccccgccgcggcttccaagagagacctgaccactgaccccgccctccccacgctggcctcattgttctgcttttaagagagatgggaaaagtgggttaacatttttcttttcggaagcaaattacatagagtgtttagacatagacacagataaagggttctttgaagacctttgatcgtttgcgggaaaagcttctagaacctagacatgtgtatgtataataatagagatgacatgaaatcgtatataaagcaaaagaggtcaaagtcttaagttaagccacgcgaaatttccgttttgtgggtcagacagtgccaaatatcggcaatttcataagctcagagagacaagacagtggagacacaggatgaccggaaaagattctggattcagggccttcatccgcaattggtcttgtgccttgagtgcccacggttctggcgctcagtggccccggggtgaaaaggcagggtggggcctggggtcctgtggcagctggaagcacgtgtcccccgggacttggttgcaggatgcggagacagggaaagctgccgaaaggactccatctgcgcggctccgccctgccctaccctccccgcggagccggggagacctcaggctccgagactggcggggaagaggaatatgggaggggcagttgagctgtatgcagtcctggaacctcttttttcagccccgcagtccacaacggcccgagcaccccttgatgtgcgcagacccccggcgtggctctcagccccagcaccgagcccctcccagccaagcgggtggctctgcagaaaagctggctcgagccccgcccggccacacaaaggcgcggccccacccagcccgggcgcgagaccgcagaggtgacccccttcccagggattcagggagggctgtctcttctcgcccacccacggtccgcggagctcggggctttttttcccccagcccaagccccccgcccaccctctgttctctatgattttccagaatggagaccccgcgaggggcttctctaagggagaccctcgctcctccagcggggcgcggctcggccccacccctcccagctgaggcccagagccgcctaccgctggccgggtgggggcgcacgtggcgactgggtgtgtggagcgcagccagccctgcagagccccgcgccgcgccctgcgctcccctccccggagttgggcgctcgcccccgcggtgcagccggggagaccggtttctgcgcagtgtcctgagctacccccgctttccacaattcgcagttcactcgcacgtccagaaaggttctgagaatgggtggtgggggcgatctcgcctcgctttctgcacccctcagaaaggtttccgctgcaggctagtggctgcaaactcatcgtcatcatcagtattattatcatttcaaatcgttgttattatttaatgattcagtagccttgtttgttctcatttgttcaaaagggacgtggattgctcttggttaaggattaacccttgttgcgttcgctttgcttcctcctaattgccctcatccctttcccccacaaaaaggtaaatttgtctccagttgttcattttaagttataaagcaaatatatttttgcttcctgccaggattatgtatgttcatgtggctaagatacatgtgcaagtgcttgctaagagcagggtttgtgtgccaacgattgctggaaaattctctgcaaagaattgtttgtggctgcaatgggtgagaatacacatatataattgagatgatcttcaacataaggttatatctataaatatataaatatagtttatgcacaaaattttaagttttttcccctgaaactgttcttccaactgctgattcttgatacagcctcaatcctacacagatacatggatcgtgaaatggtagccgccatccaaataaaaatcccaccccaaatatgacaaacgcaagcatcctttctggccataatttaactgcatttgcaaatcatgaaaaaaacactacttctgcagtattaaaataatagattttgaaattaattccaatttcaaagataattaattatcagggcgagtgcttttttcctgattcattaaacaattatgtattcagcatgattgtaagaggtgcatataatattccccattatcttttctaatgaagtgggcaccttctgaatggatatataagtaactagaaatgaaaagctgaggatttggtcagaatttcaggataaaactgaaagaaatggcagtagtttatcaattaatctcatgtatttagtttataccaggtgagtaagctgagcctgcaataaacactctctgtcccagtgtaacacgtcgcaggtagctagaatgataggataaattaatagaccttgtggtgtttgtctatgcacgttaaaattctctgagagaaagtatattttaaaatgataattaagattggacatttgtgctattaaaatctacaactttagtcaaaattcacaatggtttttttttacaataatgtgacttacagatttgtagtaaattattctattctaaaagagaaatgagtgtttttattgttacagctattacctcattaatatttttagcaaacttttatttgttgcattgaaagcagttttaattactttgggtttttatttttcaaattactaatggatagatggtggaataagcatttaatcatttggcacaatatgacttccatcaaatagctcattctcagtgattaaaaaatgctacaagaggctacaatttactcagattcaggaaatgtcctttcagagtgccataaggctgattcatataataaaatagttttcttccctataatttaagatcaaatagttacttagttctgtgaatacctagcagtagctatcaaacagaattttaaagttaaatctgtacaactaacaatgaagtggaggatgaatcgatacatattgaatggaagactttgtcattgataaattcaggccatctttaggaaaattccggatttatcaatcaccattattttttacttcaactgagtgtgactgatcacatgctcaggctaccttggtagctcattgctcacaggaggctgaaaaaagctggcctccgagcaggaggaagctcagagcacaaacctaggcctgggcgtggccactgggagctgctgatagcgaaccccagctcacaccagtttcttttttggtcgtgggaagaaaaacacatattatcctgttgtcacaagatctgtgaccttatatgaaaaaatgctagaattttttcattaaaaaagaaaatactgaactagccagtgacccagatgttttcagaacctagactggttctgtccattggaaaacctcggtgtctgcattaacttttcaccacactagagggcaatcatgttctctaaaaaagcagatgattgatgtaaacctagttccaaatattaactgtttaataaaatcttttcttttaccaggaacattcaagtgtttattcaataagctgatgccatgctttaccctagtggatgaacagagcttgtacaattttcaaggagacaggatgaaatgagtggtcataatctgaaagtagatacacgccctggttaattattccctgatggttttacttctcagttttattacattgttattataataccatttatgttacttctgagattttgtagtggataaatagtagaaaaatgtcagtagtaatagcaaagttatttagcagccgaatattttaatgcttaaaaataaaggaataaattaaagaaaatcattgtttacttcttcatcgattgaaatgtgccccctgttcagagcacatctgaatatcagagtctccacctgcagagaacatgcagcttagcgagtaaaacaggcaggtatgtgatactgaggaggtgtaccaaaaactgactgctgttatttttcccatcttctaagtctgtctttcttttccatttaaagatacctttttaaatctaatccaatgtgatttcaatctagttttatcagatttcaacaattattgagcatctccttgtagtggttttctgtttattagaaaatcgatgttaattttaacgaagtaagaagaaatatataagtataaactaattttgggtatcatcaaaagtggattttttaaatatgcattgatagaattattttttgattacattttatgtaattctaatccagctataaaatatttaatagtgtcatattactgtgttcctcaaactttgatgtgcatatgaattacctttgattttcattaaaatgcaaattctgattcaatacatctggcttgaggcagacattctgtcttccgaacaagctcccagatgatgctgattctgaccactaaacacatcagttttagggatattaacttgtaatatacaggtatccctcctggtaagctctggtattatgtcttaacatttttaaatctatggtaatctttacaaaatattttacttccgaactcatatacctggggattttattactctgggaattatgtgttctgccccatcactctctcttaattggatttttaaaattatattcatattgcaggactcggcagaagaccttcgagagaaaggtagaaaataagaatttggctctctgtgtgagcatgtgtgcgtgtgtgcgagagagagagacagacagcctgcctaagaagaaatgaatgtgaatgcggcttgtggcacagttgacaaggatgataaatcaataatgcaagcttactatcatttatgaatagcaatactgaagaaattaaaacaaaagattgctgtctcaatatatcttatatttattatttaccaaattattctaagagtatttcttcctgaataccatgtgagaaaattcttaagaatttattgagtatgactgtatatttgaaaagagtgttttcttctgcttatctaagccaataaaggatcttcattattcaattctaactttctaaggaagtcaacctacagatcagaaagaggatcttcaaggaatagcatcaaagacatagtcaggtctcccatgcagtgactggctgaccatgcagccattaccacctttctggaaatattatgctgcaaaaatgatacaatacacgaaatatctcaaattaaaaaatataacatttcccaaatagggcactaaaaacatgatcccaaataaaactagcttcagggtttgcagaatatactgttactcaacacaaagttggactaagtctcaaagttagccattcagttgttgttaacagttcatttcagggtctctcagaagctgggaaactttccatttttgcaatttcttgtacattgaaggaaaggaagacacacttaagacagcattacaaaagtaattcatgttttaaatgtttaattctggcagtcgggcagggctctctgtataacctcatttggagatgacaaaaatctaaacttgagggcctcgagccaataagtcttcctatttctttactcaaacattttcccgcaatggtgctttctttcaactgtttttctggtgtattcataaattccagattctctatgggaagtaacttttattgattgatttaacccttgtatagcacatataacatgcaaggcattgttctaagaactttccacatattaactgtgttaatcacttaataatcctaagtaggttctattacagatatggaaactgaggcacagaaagttgaagtatcttactcaaggtcacacagttagtcagatccagaatttgggcccaggccatctggcttcggaatccatctttcaccgattgctgctagtctcatatctgttccatgttagaggtgagctcccattgcagaggtcacacctgtgatatcaccattttatttaaacagaccagagatggtcttctcctttctgatcacagactcaccttgaagagaaaatacttccaaattgatgcctagttttaatagcttacctggggcttattcaaataattgccatgatttaggctttgggagaaagagagctatgaggccgtgtgggttgtaacgtatgagacacatggcgttctgcaggctcagcacagcatcgatttctggtgggaacacactctgatgaccagttccagaaataacattgacttaatctcctcagtcccatcatggttagcacatttcaaaatgcctccttaactacttccataggccagagatatttagttttaacattttgttgaataaaataaatttacacattcacatttaatataactattagatgttatttcaagattctcttcatattaccatcaaagcaggcaggcaggcaggagagaactgtaggaaggttttgaatcccttgtgaaacatttttaattatcttttaataaaggaatcaggccctgtcatttgtcaaggagacatttgcagtagtaaagcttgtgtttataatatccatttttattagtcatgattaaagataacatttgtgtacatttgttctcacaaaacacttttatatgagtgtaaaggttaattaatgcatttcagccatcattttgctggtcatgtggaaatatagcttctttaggaattgtacttagagtaggagccacatattatactataaaaccataacaaaaatattttaagtttgttctcacttgttgttgacctccagagtaaaatatttaatactctggaaagttatgggtttcaaaatttattttatggcaagaaatagataattacagttctcatagagcacatttaaaataatttatttttatagggcaaaaatattgcctaggactgaatgatttttttttttttacaaagattgtaaagcaacgcctgcaagagtgcccatttagcagttattcttctggaataattgtattttggatgttggagttcgcacattaaccattagtacaagtacccaatataacaatagatcatcaggataataaatctgtccatcttttagttgtatgtctttatatcaggataaagagaattgagtgaaatttatctaaacctagtcccacaaatacttttacaagagagcatgttaaagtgtaaattaaatttttattagcattctactctgtctttggaagttttttttccttatgaaatgcagccataaagtttaacttccattaacaaagctgctcacagtaaacctattataataatagtttcccagtttgggcttcctagtgaggagcaacctaactcacacgaaacaaccccaacttataatatattgactgttacaaaactgagaccagaaaatcccatcaagatggtactgttatcatttccagactctcgggaagaacattaatcatctcaggcacttttaggatagacttattgcagcctccctgggaactctgcttcagaacataattatttttattaatgcagagttactttttatttccaacaaaaatatctattgttattatttaagtcttacagctttatctgagaaattccaattagcacccttctcataataaatattcaaacacatgaaaaattaccaaagttgttctagtcttttaatgacatattacatgatcctgcactcttgtcactttaaaaattatctttttattatatttctgatgatttttttcttatatagttttttaaaaggagcaggcaagcatagaagactaaaaaatgttcaaaagaaaaattaaatcgcatgatctatctatatgggaccttgtcatttttagaaaacattcacctgcttcatccttttgaatcttcatataatccctctgagatgggcatactatacaagttgtcttatttaaagattggtaaatttaagctcaaataatttattcagtggcaagcctcagaggcagactcggaacacaggtctaatatatattatatatatattataacatataatatatatattacatataataaagttgtgtatattatttacctatcaaaatatttatatgtaatatataaatatgttatatatcatgtatgtgcctatttcatacatatatacacattcatgcaaaataaggtttagcactccctccactgtcctgtaataaaacatgcacagtgagaatagtcatacacgaggcatatttgtcttcagtttaaagtcattgatagtcagtgtcactaactaaagtaaaatagattggagcaccaactttgttctgaagcctgtgccaggtattatgagaacaaaaataaaaatgttcctcacccttggtggatttagtcttttgcagaaaaaaagatcctgtacatgtcagaaagttcaatagtaataatggtaatttataactataaatggaagtcaccatctcacaatttcaccatcttaacaattttgttaaactgccctacaatattacaagatagtacataatgatacactagtaacatcaactaggaagtaccaagatccaccaaaaggctgaaaaatttaaatatttaatgagtccatcaaccaatctggccagagaattctttaattaaaatgcttcccaaattttactgagaatcagcagcgtttgaggagctagcctccacccccagaggttctcactctattaggtctgaagcaggtcccatggatttgcatttctaacaagctcccaggtggtgctgatgaggctgattcagaaccacacttggagtagacctaaaacagcagtgacctgtagggtccccaagcagcaggccaggacagcatgtgagttacgtcctctgtggagctctgcaacaaggcgtcaagaggtcagagtctaagtccccatcagctctgcccttctccaccagtgctgctggtgctgcatggaaggaagagcccagaagggattctgagtttcagtctttactcttgctgacgcaccttggtcaggtcaattttcctgtttgttcctctaattcagcatctgtaaaatagccatgtgaactgccttgtccatatcagagggtctttttcagactcaaggaaaaaaacgtgaaagtgattagtgtctgtcaagtagtatataaatgcaagaagttgagtttttaaattgtcattagatataaatacccatgtgcatgcatttagaatgagtaaagagggaacaaggagcgcaatcaaaaactgcgtcatttgctttttgaaaaatactttctatgtaatgaaaagtgaaataaaatgttaattgagtccctctgacaacagcatcagacgttttgcagttcttgtgattagaacccacctggccagcccttcttcctcctaaagaagagccttcttcttcttaaatgaaggttggctcagaagaagcaattaactcattcaacgttttgttacagtcaatccacatccaacttttccccaactcaatctgctttaagggaaggatggtaagtggtggcccaagatggcaaccatcaagcttagagaatctctagaagcaggggtgtccccagcaagtagacactgaaaatatgagagggctgataagccagagataaaactcagtacttactttgcttctagtccatgtctacccctttcttggcaccaccttgacactaccctctgagtccaccttcctgagatggtacaaactctgcttagacaaagcagcccatgtccaaaggtgttagggctcagtttaaagctgccttcaaaagttaaaacagaagtgtaaagttctgtgcaattaaaaataatcagcttgtcttggaactcaaacgaatgtaaaatcctatgaaaattaaaaagcagtaccacaagttaccccaaaagtccttaggtcagtaactgttcctgttacaggtaagagagagcatggattagaggtgggcgtgggtatccagtggacatggttttgaaccatgctccactactactcactatctgagaattcttaaatttattaatcatttctatattataattttctcagttatgaaatgggaaaacaatacctaaatcacatggttgttaagtaagcaattgattgttaagcatttggtcatcaaaaatattaatccccttccctgattccctagataaatgatgaaaatactaaataaaaataataaaaatttaaagtgaacatctcaattcttatactttgttaatttctacatgtattacaaatctactagaaattacttggaattgaggaaatgattactgcttaataattctttgtggtagagggagagttggtatcatatttatgagacagcagccaatatagtatatctcaaaggaaaaaatccattctacataatgccagaatttaatagttaagcattttatctaggtcacagcacaataagcaagatggataattaaaataaaagtatatttctcttgcatatatttctcatttcatgtttccctatcatattttatatcttaccttacttcaaatacatatataccttcaataaaactgagccttcttgcttacccaggaagtttcatcattcagtagaaataaaagatgactttagaaatattaaaatacaaaaatctacactgaggtcttttgaatgcaggaaaaagaattatatcacacacacacgtacacgcacgcatgcatacacacacacagaacctctcgttctttcttaacatcttatcaatccatcagtttcactcccactccgtatcacctgactgtgcacaatatctcattgccacctcccagtcttctccctgcctggcaccctcctgctctcctgcttccactttaaacacccttccttcagctaggtcttttctttcagggatcctcccgttgctttcttatctggatcaatttagccttcctcttctccacccattagtggataagcacgacaaagacactagagtcaaataatacaaacagaatataccttagatgagtatggtgatgaaaaggatatggatacttagagtttagcactattctctcagccactcaggaaagcaacgcctttacaatcaatagtgtttcaggtaccaatcaataatctgttattgctatttttaaaatctataaggtatcagtaaaatgtaattactagagcaacaaagatatcttgtgaaatcaaattagtattcatccagcaactgagtacaaaggtttaagggaggataactaccaataccaaaacattttaagcattttgttttgcctcctaaatatcaaatcatgtaaatgtgtggtacataaattaggaattatatttatgacatagctgcagacatattaagagaaatatgtgcttatatttacaagtatagtacagttctttttcatattagatactgttgatgataatctgcatataaaaatgctcaatattttttcacatttataagccataaaatacagctaataaaatgtgtttctactttctcataaacatggaatagtgacaaacaaggagctttatatgaaagcaccattacaatttaaactctcacaaggtcataatatattgcactaagcaggagagttcagcttatttaaaaaaaaaaataaactctaatgaggttctggaatgcagagccaaagcataaagatggaaataaaagaattgcatgtcttctgaactgacttggttgatgatttttttaaaaaaggttttgtgtcttctgacttggttgatgattttttaaaaaaacgttttgtggtagaacaaataaggtaaatgaaattcagtatttaggatgaaaagtttttctaatttcaggaacaacattgaagaaatattgaactaagcagctttgaaagaatcagattccatttgttgaaatttttctgagaatgaatttttttaagacagtgtacacagttgcagtgtgtattggttatggattgtggcaagctatattacaacttacccaagaaataaggaggctgggcgtggtggctcacacctgtaatcccagcactttgggtggccgaggcgggcggatcacgaggtcaggagatcgagaccatcctggctaacacggtgaaaccccgtctctactaaaagtacaaaaaattagccgggtgtggtggcgggtgcctgtagtcccagctactcgggaggctgaggcaggagaatggcgtgaatccgggagggggagtttgcagtgagccgagattgtaccactgcactccagcctgggcgacagagcgagactccgtctcaaaaaaaaaaaaaaaaaaaaaaaaagaaagaaagaaagaaggaaaaaagtcacttgaaaagaatactggactttgtgtccagcttgcatagctgaaaagaataaaaacctgtccacttaaactcattgcaaaaagaagatgtcactcctacaaatagcaaagagtcatgaaattattctatccagaaaagtatacatttcatccctttggataaattttagaagtgaactatgaatacatacggtgaggatagccagctaagaagtcaagaaggatttctcaaatttgctgctcagaaagatcatactctccacaaaacaaataatagcaggctttccaagtcaaccttgaatccagctttcctttatctttccttcttgtgaactttcactagtttactatctaacaatgaatttgacgatagccacataccatcttatagcaatatttgttatcatatcccttgttatttatcattcacctgctctgcttgagccagctacaagtcacatgtcccacgcactttttcctgtttgattttttacagcactttgagacatgtctcattattcctacttgacaggaaagaagccatggaaagttgagtgacttgctcctgatcacaaatgctggccaaggaagagtcgagtttcaaatctaatgatctttccactgcactctagattcctcattttgaactatttttttattttttgcactatagacttttttccacattttgaactgttttttattttttgcactatagacttttctcttatacccaactatattgatgacttcttttaggctagaaacttgtttcacttactttccctttcttcagattgctgcaatattggccaacatgtattgggtacttactgagtcaagtactgtgattgtgccaagtatcttataggaggattatcatcctcatttttacaggtgagaaaggaaaggaggtaaagtcacacacagccaacaaaaatggtagcaccaggatttgaaacaaatcagtctgacccaagttgactttgttaaccactgtatgcacagtcttcttagacatagtaagagctctaattgtgtttggtgatttgattattatgacaaagtaagtaagggaagcagggagaattataagaaataaggctccacaacacttggctatagcaaagccccttaaaacttcaaaaggtcacccaaagaataaagatcaggctgggagcagtggctcacgcctgtaatcccagcactttgggaggccgaggtgggtggatcacctgagttcaggagttcgagaccagcctggacaacatggtgaaaccctgtctctactaaaaatacaaaaattagctggatgtggtggttgccgcctgtaatcccagctacttgggaggctgaggcagggagaatcgcttgaacccaggaggtggaggttgcagtgagccgagatcatgccactgcactccagcctgggcaacaagagcaaaaaactctgactcaaaaaaataaataaatcaatcaataaaataaagatcaatttggagaaattaatgcttattaataagcaatgtcttgcacagcacttcagtttctcaatacattacctaactcaatccttacaacaacaccctatccccattttgtggataaataaactcatgttcagaaggttgaataaattatctaaggttaatagttcctgacctagagctcaaatcttcagtttctatcatattcttgcccttaccctggggtagctaacattcactcactagtattggagctaaaataagggagagaacatataaatgaatacaaaggagacattcacctgccttctctttctccttacatagagaaggttgattatctgctattgtgaagtttgccttttgaaggatagaaatgagaagactttcttaaattttgcctctacgccaagaaattagagtggtaccaccagtagttccattttcaaactatcactgtagctaaagctatgtggtaagggccaaggaaaagaagtattcttgcacttcaaaatgcactgaaataccagtcagtagcataatataaaggaatttagtggagagaagagttgacctcaatctggctccaacatctcggctcttaacccctaccctacacttgttcttcatggggaagctaattgggccactggaagattcagcagctaccatttgcagctgagggacagcccctccctgcttagcaaccaatggatatgcatttatggaacacctgctaactgcgacacacactcctatgtatgagggaaaatacaaaaaatgttaaaggagatgccttcccttgccctcaggaaacttaagtatagttgcaaagaaatgattagcagcaaacgaaaccatggagaagtaagggctaaggtctgtgaaacaagcctagaaaataaccttgtccttgaaaaacacaaaaagaaagaaagaaagaaaagaaactccaaggcccttgtgaaggaaaccattaagtttgcttcacttctgtgtttaggaagacacaaacccagtcttaatgaacctcaaggccacaactactggagacatttaggaattgtcaccacattctaatgtatatatcctctgtttggcccttcctattaatattttgtaaaatttttgaagatatgagcaatgtttaaaaccatgaatccccctttttttataagtaatatttaggctgaataaacaagagaaaataggacataaaggggagccaacgtgtgccttcatttataatgtattcccaagttgtgagtttggtttatcagcaatttatcatgccaaattccaagtcatatttatctatgcagatcaaacacttgattctatttttgccttaatttttttattgggtatgtttatgaccaagtcatatggtattttctgtgacagataaaatgcacaggttattccaatctggctcagccagtcatagcaacatgtagtccttctcatgtcttaagaatgagtatcaagaattcaaagggagttccagatggcatccaaaaagcttacagtttatgcatcacttattctaacagtagaaaaagaatatttgaagccaaaaatagaccttgcatgtagcatgtggaagagtagaaattgccctgatagttaaacaatttgaaattcaagacattaatttctttatgaagcatttgtcacatcataggtaatattttatgcctatcatatatatacttattatgaaatacaaagaaattattcattctatctaagactttgtatcctttaccaatatctctccattctcccacctccaccctagcccctggaaaccacccttctactctctgcttctatgagttcttttttagtgagatcatgcagtatttgtctttctgttcctgtcttatttcacttgacataatgtccttcaggcttatccatgttgtcacaaatgacagaatttccttcttaaggctgaatagtattccattgtgtgtatgtagcacattttctttattaattcatttgttgatggatactcatattgattccatatcttgggtcttgtgaataatgatgcagtgaacataggagtgcagatatctttttgacatactgattccactttgatgggatatatacccagtagtgggactgctggatcatctagtagttttatttttttttattttttattttttttattttgagacagagccttgctatgtcgcccaggctggagtacagtggtgccatctaggctcactgcaatctctgcctcctgggttcaagcaattttcctgcctcagcctcctgagtagctgggattacaggcacgcaccaccatgcccggctaatttttgtatgtttagtagagacggggtttcaccatgtctcgaactcctgtcttcaagtgatccgtccacctcagactcccaaagtgctgcgattacaggtgtgagccaccacgcctggcctagtagttctgtttttaattttttgaggagcctccatactgctttccataatggctctaggaatttacattccaccagcagtgcacaaggattgcttttctccacattctggctaaccagtctcctgtctttttgagaacagacatttcaacacgtgtgagataatatctcattgtggttttgatttgcatttccctgatgattagtgatcttgtgccttttttcatataactgctggacattaatatgccttcctttgagaactgtgtatacaggagaaaataatcacttctcagaggagctttcatttcaaaatatccgggaaaaaaatagaaaaaatggaaaatttatcctagagtaagttgtcttttatattttgaccctgtttgtgacataaactggatgatacaaaactggaatgcaaaggctttaggaggattacttacttacttgtatattgctttaggttgtttgcagaaaattatactaattgaagttcaggctatgatgtgataaaatctatgtcaggagatgagtctacatgcaaagtttgaggaagtgacatttgagtttcaaaacaaaaaagcaattttcaatgtcatatctaggttaacccaaaagatttctttcaccctatttagctgcctctaagatggatgctgaggataattacactgtagaacaataggacgatgcttcacactcacctcacaggctctgttattcccacatactgccagagatactccaaaataaaatcactgcaacatcaggcagttataaacctcaacggtattattttctatttatatacagtatattttatattttacaagtataaaatagaatatatttattctattctctttgacacaaagtgaccataagacatattacttaagtatgactagcaaagtcatggggcttgtcattcaggaggaaactcttaactaactgttcagtttttgttcactgcaccatttacataagccaaactaatgcttcacactgtgcaaaacaatgcacagtgttgtgaatgaatggctaaaataaaactctaatgagtggggtttgaaaaatgcaactttagaaaactgttgagaaaatgttgcacactgcgcattttacaaaatttcgttgaaggacactggatattctttttaggattatggagggaagcaaaattttggctcctacatgcagtttttgtggcctttgcctgaaatagtcatctcccattaattatttagatatcattcatttcctaagacaacatttagggagactgccttaagtacaatttgtacactacccagataagaattctttttggtgaaacatcgataaatattacttggcagtaacaccaagttaaaatatttgtttcacagtcgacgttaataactattatagataaagtgaattttataagacatactcagatctaaaacagcaatatggagctcttcaaatccattgaaacttcataccagcctacggaagtagaggtttttatgcaaactcttcaagaaatatgctctgaacttttaattccttagattgatagaggaattaaatcatgatataactaataggtttgtggtacaaattgctgctgcttaatctgactctgtgtcttcccagtgttctatatgaattagatattccattatctaaagacaatcaaccccatcccacggtgatagctctaggactccctttgagttcattaaatctgtattctcagtctccaaacttctggttaattcaaacagaaaagtcaactggcccatgaactaaaataaagtcatctgaattttttttttattttgcagtgtgataaaagtctcgcactttttatttctgaaagtttctgctttcactgagagcataataggctatccacccttatgcaatcttacatacaaagtcatagtcaggctaaattcaaaaacacatgtgagatagaagtcaacgtttattttctggagaaaagccacacattacaacaaagtgaacaatgaagctggcatccttatcactggtgaccaaaacatttgtgactctggacattggccccacaaatgcgataaacattctgcataggaagtgagttttgctaattaaaaatggatccaaaatactttctactcttcagccaagaattaaaaagtaatagggaggaattgaaatcacttgggtgctacattgagccattctggagaagcaattcagagaatgtcatggcagcctcaaattgctgctcaggagcatcccagcttagaagattgcaggaaaggaagagcaaagtcattcttacatgagaactgtccttaaccagatgaatagactctccattttttaccctggctttgtctcatttaagtcccaaccaatctagctatcattttaggttttactacctgctagtatttaggagcttagggggataaaaaaatccctcaatactcagaattagacttggtgataaaaatcttgacacataaacagaataaagcgctttcattactcctctaaaccacagtgtcatttggtctctatcaaggactgtaagaatttctttcatcaggggaaagaaaaaaaggacaagagcctgcaagatgtagcggaactctcattaaacacagcaggagctttaactggaatccagagtaaggtgaggtaccaggttacaacaatttactgcttttattacaattttgatcacaaggactgattcatgtcatctagtttcttttccttgtcactatcactggtgctaagaatacatcaaattgaaatttaagagcctcatatgtttctgtataacccagtgatgggttgtactgctttgaccttcttaaatgtccctttatttcatttgatatccattcccatagaaaaactataatgctttggttggtcaaaatattaatctttcaaaacctccctggcttagaaaaccaaatttttgtagagagagatgggtagaatctaattttattctaaagcaattagcattacatcatcacagcagaaatatctagaatattacctcatgtcagtgatcttctgatatgttaaaaagggtattttaaaatctgagttatttctttttctttttaaagttacatcattaattacatactcatcaaccaaaatattttatgctccaaatttgaaccgatatagtatgtaagaagtgttcaaaatgaaattattttggtctattttgtctttgaagaagatcacagggatggacctcccaaaaggatttttaaatgggattacatatctgacttttaaaaaaaattatctgaccttgagttatagtgccccaaagtaagcaaagttccaaacacacagtatcatcagaattgagttaaaattatcaccaggggcttaatttctgaaattaaaaaggaaatgttatttccttatgaaaagaaaaggaaccaaaaatgaacttcaaggtagctgatttctgtctatgttaagacttaggtaatgggagaaagggaaaaggaaggacagaattaggagaggagcagtgtttaacaattgcgggtgcaagactcaagttttttagaatccattagcagagaaccctatttctcccattaactgctgtccttttaaatcctggcaccagctctgaggactgcagggtccatagctagtgccccactctacccagtttaaagacaccactgcctggaaatgacaggggtttttttcttaaggaaagaggtgctttctgccacgtatatataaattggtaagcttcaaataaagtgcttttgtcctttctgtctatcagaaactgtgcaaatcgaattgctgtaaaaccaagggcaagagacatcaatcctgcattctatagcatctgattttatcctttatccccaggcacatttcaaaaggaaaaaaatgaggttgcatttaaattgagtatttgggacttgccaggaaaacctcccgctagactaatatgattgcagggaaaacaagagaaaggaaaagtggagagggagtgtgctaacagatcctgggcctcgtcagcagagccgtcctgagcacaaggccatggtcagacatctggtcccgcgaatgacgttttctttatggtcattaagaacaccagtgtgtcgggacacaaacaagtattcctttcagggattatgacacattttctcccaaagtagtatattaatgacatttccagagcattctttactatcttttatatgtgatcaggaagactaatacatatcactacttcttttacacacagcattagccaaaactaaagtgtcaaatacaattttgcctaggatgaataaacagaagaaatttttatgatactgcactatcaattccaaattaaataacaacaaaatgataagtgttaaaattcatattaatgattgttcccacacaagccggaaaaaatctttctaagaagtctttcatgagttaatcccatctttcaaagtgttcagtggctccgaattcagttactgtttcctatcagttcttctttcattaagtctcttcccttttttttctctttgcactatttcccttagccgggtacataatctgctgtgctttattcatttgtgtcttaagtttgtttcccgatgacatacctttccagcaacgccatctggggagtttgggcaactgtaccacgttaggaggaaacccttcttcacaggagagtgtgcctttgctgcagggaaggaattaggatttgcttggactgtggttgcagctggcttttaaggatctccttagaatgcaagcaactcatcaatgagaatctctgcaatggttgtcactgggtagagtcatgctatgtggggtcatagcctttgaaacaaataacagtaaagataaaaatgctattaaaggaatcaccacccacagaggttaactgggttttgtccccagaccacctcgaacaagaaagaacatttttatcagtcattttcttagttttagctgataaaacaaagtaccatagactaggtggcttataaacaacagaaatttatttttcacagctttggaaactggaagtctgagatcaggccgccagaatgatcagattctagttagggcctactttgcttttgcagactgccaacttctagctgcattttcatgtggcaaaaggagattgagctagctctctggtctcttcttataaggacactaatcccattcatgaaggcttcaccttcatcatctaattactctccaaagaccccacctccaaatactatcacattgggaattagatttcaaatacaaattttgcggggacacaaatattcagtccataatagtaatgattactcattatacatagggctctaaatgtgctagcttctgatagtttttacactcacttctctttattagcttgtcaagcataattagggcagtggccttactgaaaattattgaatttagtttcctaaggacagatattgaggagttttttcttcactaaaaattcacgttccgatacagctttcatctgttactactttgtgagatggaaaatcttttattttatttttatgtttggattgacccttcttaataaagtcggcatgtaatatgcttcatgtgtttctaatatgtgcttaattttgcaaaatgttttgcataccagaatgcatttctcttccaaaaaaggtaccagcctacaaaaccttgctgttactgttttcaattagttcatggaattaaatgtattaaatgttttatgctctggcagaaattatgattctcacttaactccatataaatctggatctgcctgggcctttataagtgacacaatttcattaactgaataaacaaatgatacaaagaaatttggtttagccttctaaaattccaaaggcgttcaacaaaatatctcagaatggatgttccaggacttttatggcacaggacaacatgtattgcttattttaagaaaataagctaaatagtgaggggattcttttagcagatcctcaggatgtgttaggttgaatcataggcaaatgatatttgatcattgcacctgttaacacattgaacctcatcctaaaattgtagagctagaagaaagccttctggcagtttttaaatagattgatttactgcaatttatccagaagcttcaccgttgtcactggctacatgtgactttggcctctgtggggctatatcctcatttgtaaaattggtggtgaggtaggtggacagttgactaaataatctcttagaataattctagtatctgtggatctaaagcatccaggggttgaatatgtttctttctggccaagaaaagatgcacctgtcaataatgcccaaactcatcttctgagaatcctctttcccaagatacccactctcccttgggttatattatagtaatgatcagaagcccctgccaagaagaaactgttaacctgggaggtctatattttatttcacagccatctgtttatactttctcacaagttagtgcacagtatacccatcattttctaccattttccttaatttattaattttactaattgcataattaacaaaagtaagaagattttacctccttatccccatctggtagtttgcagatacttggcctgatgacaactgacagtgatgagatactcaccaagtttaccagggcaggaggcttcctagagaaaaaatgagaaaatgaaatggggaaggggagtgaaggattgaggaggtgacaatctggactcttgcaactgcatggcaaggttggcacacaagctgggttgcaacggagggaaggagatccttatcagatgtaatcagagctcagatcgagggctttggtgtgtgtagaaagagggagagacaaagaacttaaaacagagctgccatttgaccttgcaatcccattacttggtgtatacccaaaggagaataaatcattctattaaaaagacacatgtgcttgtatgttcatggcagcactattcacaatagctaagacatggaatcaaactaggtgtccatctatggcagattggataaagaaaatggggtaaatataaagcatgcaatacaacatggccataagaaaaaatgaaatcatgtcctttgctgcaacatggatgcagttgggacccataatcctaagtgaattaacacaggaacagaaaaccaaatacagcatgttctcacttataagtgggagctaaacactgagcacacatggacataaatatgagaacaataaacactgtggactactagaggggggaaggagagaggtttgtaaaactacctatcaggtgctatgctcaatacctgggtgatgggatttacaccccaaacatcagcatcatttaatattcccatgtaaaaagactgcacatataccccttgtatctaaaataaaacttgaaattaaaaaaaaaagaaagaaagaaagaggctggaaatagaggctcacacctgtaatcccagcactttgggtggccaaggtgggtggattgcttgagcccgggaattcaagaccagcctgagaaacctggtgaaactctgtctgtacaaaaaatacaaaaattatccaggcatggtggagcgcacctgtagtcccagctaatggggaggctgaggggggaacatcacttgagcccaggaggtggaggttgcagtgagctgggatcacaccactgcactacagcctgggtaacagagcaactctgtctcaaagagagagaggaaagaaaaaagaaaagatggacagataagaaaatgcacttggagattaagagaaagcagcaacataggaccctggataatgtgtttgcttaataactatcctgatgagttatctgactattcccaaatgagtacgtggcaattcaggctgaaccatcagagtagccctccggaatcttacttatgtacaatagacctgcatgcacatttactagaatgagcctctctctctggtaatcatgtctgcttccactaattccatctgtttcctctctctccctcctatcctgctagatcttaattccttcgaccttcctttgtttttctaactccctttctttctcttgttatttaacctgctatactatgcaattgatctcctctgcactaaggaacatgcacttcagaattctgttgacatcttgcattcctttatatttagtgaaagaatgcaaaggagtctacctggcaatattcactctgcaggaggcaataattattattcaaattaaaggaagcagtaaagagaaattcagaaaaaatgaaatatactaatcttcagcttttcatttcagcctacaaggaaaaaatgaaggagctgtccatgctgtcactgatctgctcttgcttttacccggaacctcgcaacatcaacatctatacttacgatggtgagtaacctaggatagacatacccctgctagctagatcatttggaaaggttgacatatatttgtttcttacagctcctgatataattacatcaatattttgtagctctcactattgacttgccgtgtctagctattatgtccaattgattacctattgctgaaaacagtttgaatttggtgctaataacaacacatcaatgtctgttaagaaatgtggatggattcttattaacagccacatccagcatatcaacatccacaatatgtctaaggtctttctttgcaaataatttaataggctaagccataattggagtagatcataatttgtaagaaaatgctttatacttagaaaactcaagagaaagaatcaacaaccataattgtttttgctttattgtagtctttataaagtttctatactttgtatatacatgtcaaccagctaatgataataataattggctcaataaataaaactgacttacgactgaggccctagataaagagggtctgaaaagaaaagcctaaagaattagcatggcaattaacatgattgaggtgcaactctttaggtttgatttatcctgattcattttgcttactttggctctgccacaatccacatgatcttggtcaaatagatacttggattctctaagtctcatttaactctagcatcttcctcttggagttgttgtgaggtttaaacggtttaatgtaagtcaaatatgcaaaaccaagcctagctcattatatcactctacaatgatagctatcattatcaacatcatccttacctaattcagtcaatttaactaaaatattttatacagttctatgtatcctagatatccctaaggcatattttactaactctcaggctcacaaatatttttcttttccatatatgtaaagaaagacattaatgacaaaacaaactgaccttgtggcagttaaccccttctgcacctttaaagcctattcaaggactcaaaggcatttaccttccaaagttattctatcgtagcacaaaaatcataaatgctaattaactgttccataaggaaatgtcctccatgtgaaaggaattctgtctccaaacaaaacattcattagaatgcagggccaatgcctactttgtacaaattcattcggtcagcaaataaattagacagacctttattatttgctagatgtagctgtgaagaaggatccagctatgtttcttatgagactaatgtcgaactatgggttgtcactgaggatccagagttccatagggcgtagtcctcaccttcaaagaattcagggcttagtagaagagtcttacacaaatgactagaatgtagaacacagagtggttaggacaaaggagccagggatggtttttgctgggttagggaatgaaaaaaggggaagaaaatatgtgaagttatgtgtgagctgattcttgaaataagctgtttttatttgcctgcgttctcttataatccttttccataggcttccataatttttattgagctgtatttaaagttgaatagataattcaacatttctcgtaaactgtgcttcctaaaagagtccgtagagaatttcaaatttctgcagtctttaacttgacctggtatttctatgttagataataacgtgacttgtttattgcaggcaaacattataacaataaattattattattgtttacatttgtaagcactaagtatatggcttgtgctttgcattcagcatcctttatcatttaatcttcacaaccaccttagaaggaaggtactctttttatttccatcttttaaatgaggaaataaaagcataaagaagttaattaacttacctagtgtcacacagctattaagaggggcttactatttggatgcaaatataggcagttctaattccagagcctctaatctaaggcatttaaaaccccatcaccttatcaaataagctgtttttatttgcccgtgttctcttataatccttatccataggtttccataatttttataaaattgtatttaaaatttaagtataatcttggatgccatcaggaaaatgaaaaacatttttacatttgtgaaggaaaaagcccacatcatttccaatatagttattgagttagtattatctagactatctattagcagctaaggatctgaggtcaaggcctgccagcctggcattttacttgaccacaacctccatgtgcactaaccaggctgctaaaagaacattaacgggaacataacctgctggcttggttgccacaattttaaaaagacgttaataaattagagagcacttagaggttaggaaataatatggtggtaaagatctagaaacagtgtcattctggggcacttgaagatgtttagcctgggggaacaacttgaaatggaacataactgttttcaaatacttgaaaaatggtggtgcaccacagagaatggcctaatcatgggtagcttcagacttcaaacaaggatcagtgggctaaaaccagagagatggagtttgggactcaaagaatgctcatctgaaattgagggctgaccagcgaggttcttttaaaaatcattgcattttactaaattgtgagttctgtaattataaatgtcctagcaggtgctagctgtcatcttttctattataaattatactattttatgttataatttgtattatacaggcttaaaacataagggtctgataatctgcttatctttaatacataagccactgatagaaaataagtggctaaccattcttcagttctttttttaattgacaaaaattgtatatgtttgcggtgtatggcatattttgaaatatgtatacattagagaatggctaagtgaagcaaattcacatatgcattacctcacacacctgtcatttatttgtgatgagaacaaaaaatctactctttcagtgattttcaagaatacagtacattgttattaacaatagtcagcatggtgtacaataagtcttctgcggccgggcgtggtggctcacgcctataatcccagcactttgggaggccaaggctggcagatcacgaggtcaggagttcgagaccagcctgaccaacatgctgaaaccttgcctctactaaaaatagaaaaattagctgagtgtggtggtaagcgcctgtagtcccagctactcaggaggctgaggcaggagaattgcttgaacctgggaggcggaggttgcagtgagtcgagatagtgccactgcactccagcctggcaaaagagggaaactccgtctcaataataagtctcttgcatttgttcttcctgtttaactgaaattatgtattctttgatcaacatctccccagtctccacccctaacccctggtaaccacaattctactctgcttccgtgagttcaactttatgaatagtccacatgtaagtgagatcatgtggtatttgtctttctgtgcctagcttatttcacttagcatagtgtcctccaggttcacccatgttgtcaaaaatgacaggatttcccccaacttttttaaggctgaacagtattccatgtgtatgtgtataaattagattagtagatgttgccactccctcctccaccacagtggctctatccctggctcctggctccagccgagtacactagaggaggatattctaaacagcaacaacacaggagcaaagacattacaatggggtgttgtcttattgcccccattagactgtaagcatcttgaagacaaggacccccatcacagagtgatgttgtcatccctggagtgggcactgtgcatgattgatgactggaagcaatgaacatacagaagggcaaaacagaaatcagcaggatgctttgcatttcagcattgactttgccaaatatgcccaactgttcagggagttacattggttctaacgaagctcctgtgattcctaagcacaggaatggtgataatatatataatggtgcatgcatatatacgcatatctagataatgatatctcattatatgtgagaactgaagaactccgttatgtttctcgtctaaccaaaaagggcctacagctacgataatttccaaacaaataaatctgtgctacttgattttcatgcaaagctcatatttgttcaaaaggaaaataaagcttaatttaaaatcaatttaggctatttttatctaagtatgcttaccgttattcaactccctgcagatattgtcaaatttctcaatatggtaaatatttattctgttaaaatatatccatagttacactaaagacagagaggtcttatatgttctaaacaacatagagcaaatgctcataaacagcattttattcctatctcccggaataacaacgctacttccaattgctggaatctaaattattaaaataaacccatgctgcaagctttgtatgcttaacattctcaaatgttcacttttcagatatggaagtgaagcaaatcaacaaacgtgcctctggccaggcttttgagctgatcttgaagccaccatctcctatctcagaagccccacgaactttagcttctccaaagaagaaagacctgtccctggaggagatccagaagaaactggaggctgcagaggaaagaagaaaggtaactttttccataggttttccttctctctctccctcccctgctcctccctctcacacactcgggcacacatgcacgcacacacacacacacacacacacacacacacacacacacacacatacagagagcaatgacagctgaacctgtgccatgccaacatgtataggttttcagtagacacagagccaggctagttggggtaaaaactgtaagatagatgctaattttaggctagccaaaccagagctctcagaaatccaaagagcttcagtgctctagtgccccttcccgtatattgaatccccttattataaaagcctcccttccctagaccatcaggcagaagcactgtagagaaaacacagccctggcgaactccagtggtggggaggggaagaagtgctgcttcctccctctcaggatctgtgtcaccccctttgtcaggcgtggttttccttggaattacaaattaccagatcttccctccaagatctttcctgcccagggtaagggccaagagcttgcccctttcctcttcagagtcccactgcctgccctggaagttggtccttccaagatcaggaccttctctgagttctttgaatatgttctttatctttttctaagacttgatggggatttttctctttttgccattggtccctgcttatattaaagagctttccttttgccaaatctttacttttccataatcacatggctaagaagagccaagggtattatttgagaacacttagaaatcctagggactgtgtacacaaacagaagttgtttgaatgtgtctgttccaaccatgtggttatggtagttaatcccatcaaggtactcacgatcatccaaaaatggaattcttttatgtaattcatccccacattgtatttcccaatattttttatgatataattttagaatcaggtaatcactaagaacatgttccctgcacagttttatgatgttttctctaaaaagtcagccaaaactttggacacttctatgttggataattaaaaacagaatgaagataatcctcctcctaaagattgaattctccaagagagaatgcaggacaaacacagatgtgctgtgtatagtatatgtgcatatatacatgcatatatgtacacaaatatgtgtattatcaaataatgaggctcaaacattagaaatccttagattaaattttctaaacaagaaaacactaatctttgtagttgaaaaaaaatcctcctatgatatgtaatatgctgatctcaattttcacctaagagtgatgttctccaaatgtccgatgagcatgtcatatatatatatatgaatttttatatatataattacaatggtaattggtatatagagatatctatattatagatatatatagctatctctatatattacatataccaattatagatataaatataacaatggtaactggtgtatatgtgatgtgtatatatgtatatgtataccataattatatattaatattgtatatatgccataattatatattaatattggtatatatacaccatgattatatattaatattggtgtgtgtatgtgtgtgtgtatatatatatatatatataaaatactagttatcattgttctagatttaaaaaacaggaacctgagctactaactcgactatatatatatatatatatacaggaagttgctttaaaacatttttatcagcttttttattgttatttttagctttattctcatagtaaagctaaaataaattattcaacattatcaaaactttgctgccagcagatgtaagcaatacctaaaacagtggagagcatgttgcacccaaagcagtttaagctctgacccaagcactggcatcttataggcactgggtagagataagagtcataggtcgacatatattgagatgctatgacttgattagaatatggagtcagtgactgaggtgaaattaaaactcaaaccacaattcaacatcctgatttaggatgttgctggtgtttctaggtactacacttaatttgaaagaaattattgaggataaaaaaagaactgggatcaacaaaattaactaggtgttcttataagagtccctgaggttactaattaatgaaactgataaagctcctgcaccctgacagcaagaaattatcaatgattatacatttaaacaattgaattgaactagaaactggccacatggttaaaagacatttacaaatgtaatcatccagtgttatgatgcccagaaaaaaaaaattccttagaatgctttaaaagccgtattccatcacctttccagttatttgttaaacattttgtaatgcaaaaataaccatatagattatgccctagtggtcgggttttatttttagttttttatggtttttttttgttaatggtagagttttaattaaaagaaaatacaactaattagcagaaagtgccaactttaaaaaatcactaattgattttattctattgggttatactgacttaattagcactaatttaaagaactattaattatctttaaagagtctttagcaagtgcatatatctcagtaattatgttagtaaggacatgcctataaccaaaacccaactcaactagttaaaacaaaaagcaaatatgtgactaaaaagtctaggagtggctacagcatcaggaacagctggatccagggatcacagtattatcagaaaactttctttcagtgcctgtcatctcttcctgcatttaactggtttcattatcaagaaagtttaatttcaatagtcagttccaaattatttttctcacaacttagcaactccagcagaaacagagcttctttttcccaatagtttaacaaaagtcccgaaattgagtctcaatggcctggcctggatcacaggcccaacccagaaccaatcattatggccaagaggatgtagtagtttgatatgctagcctgaatcacatgcccaccactgacctgcaaaggattttaggtaagatccctggggtaagaattgtggaggggtagttccccagaagaaaatcgaggtgttctcacaagaggaaggggtaatggatcttaaataaacaaaactatagatgtccacattttctatctataaatgtttagtgttactataacaattagaataattatttagttcatacactattcaatttgtatctcccttctgttgccctgttgccgttattttcttacagatagaatgaaaaatattaatctaggcagctctgtgaaacagtactgtccaaggaatataacgtgagccaggccgggtgtggtggctcatggctataatcccagcactttgggacgccgaggcaggtggatcacctgagatcaggagttcaagaccagcctggccaacatggcaaaaccccatctctactaaaaatacaaaaattcgcagggcatagtggcgagtgcctgtaatcccagctactggggaggctgaggcagaagaattgcttgaacccaggaggtggaggttgcagtgaaccaagatggtaccattgcactccagcctggatgacagagcaagactccatctcaaaaaaaaaaaagaaagaaatgtaatgggagccatatgtgtatttttaaatgttctagaagccacattttttaaaataaaagaaatatgaaatgaattttagtaaaatattcttcacccaatatattcaaaacattatttcaatatgcatgtaatcaatatagaagtattaatgagctgtttcacattattttattcatactaagtgtttgaaatccagtgtgtattttacgtttacaactcatttcaattcatgttagacatattcctagtgcctagtagccaaaggcagccagtagcacagatacggatattaaaacagaaaacacctagtgaataatggggaaattttaggcctaagtttttaaaatccataccagataattattcagattcaaatttactttgttttttcatatatattctttaaaaattacattaatatgggaactcagaaagttcaaaagaaatttccattctatggttttagtctttacattgtcagaactaatgcaagtgtgaagtttaggatgtactgtaagtaataggatcttctaaatctcatgccttcttcagctacctactctgtttctatttcagttcctcactgtggggaggggacttctctgaacctaggtttcatctctcactctcgttcatggtaaacaggttttcctttgtggcacctagcacaattagtaagtaattagtatttactggcatattagtatatatatgcatatgtatttatttaaccctatgtcttctactagattataaactccatgaagatagaacttgtcttttgtttaatagtgcttggcaatagttattactgtaaacattttttttctttcttattcaactcctgttagtcattgcctgagtactacaaatgtttttaagtaaattaataaataataactttcagggccaaatgtgaaagcggcaatatatagcttgttttgattttttattccaccctcccatcctaaaacaattatagtcactaagtttccaaatgacatctgaaattgcactaaggaaatcctagtctgggcaaaatcactcagtcaacagatatttatcaagcacttactatttggcaggccctgttctagacacaggggatactcatcaaacttacattccagtgggggagaaagagctaataaatacatacacagcatattagatgatgcaaaattagcaggacaaagagaactgggggtgtgggggtgaaagaagctaatattatatgttattattactatatataataatataattattggatagtcaaaaaaaaacctcttgaataagacatttgaaaagaagcacaaaggtagcaagggagtagggcgggcagctcttctctgggacctgaacattcaaaatgatgagagcagcaggtgcggaggccctgaaataggaatgtatgaggtgtgtttgagaaataacatggaggccagcgtggctgaagctgagagcagggggagagtggtagcaactgaagtcagaggtcacaattaaggactttgacttcacatgaaatgggagatcatgaaggataataaagccatttcactactttatgtgaatcacagcatctttttaaagaagtatccttttttaaagggggagatgactagaaaaataaatagtgttagataaatagagaaaacaggaaaacattctagactaagacagtgattccagaactaaggatccacagaggcgagaatgcagaaagtgtaggtttcagagcagtgggtagactaagggtttggactagtggatttggatagggagttggagagtagcgaggtgggattagggagggctgtgaatgccaggttagtgtgcaaactccattatataagcagtaaggagtcactacagacttttcaaaaatacatacatgttccacctggcccacgggttagcaacattttcgttgccctggacccatttccttcccaataagttacaggtttgtgaagattctacctagcaaacatattacttttaaataactattaataaattatcttaccatgattataatcaaaggaatctgtaattgctaattatttctgattattaaaagataagcagtattgcactaaattgacataattctaactcaaagtaaatatacagatagacatggctatagatgtgaaatatgatttctgttagggctttttaaatttaaaaaaacttacgagttctcctccctccccctacccttaataccttgaaggcctctttgtgggacttcagggaccccttcagggaactatgacctaggctgtatttggggggctttctgggtttatagctggaaggctgccacagaggcatcgccacttgggctcagattcactttgtgttcaatgttttggcaatgtccccacctccccattccatctgttgacactattgcagcactgaccatctggttactaggttggaggatactccctcgggctcctttgaaccagaattagtgctccagtgattagataatagaagaagcttgtcataaaaagaataagccctttccctgctttttctccattctttgattatcgctggtagtcagtgatgatcatctctatgagtctatatcaatctcatcaggtcagtttgaacctcatctcttgaaatcaaagtttccataatgcaactgacccacaagggtgaaatgacatgaatgctttaaccatccatttatcatttattcattcattcaaccaacatgtatttagcaagaggcagcagagttagcataactatacatcccagttggcccaggacaactccagctaactctcgttgttttgataccattattaattatttctctttactctcataagtgttccactttggacaatcaattacatgagcatccttagcagggcacagtgtttaagggcatctttaaaatattgtctttaagaacatgtggttaagagaatgtctgtgttcaaatcctggttccaccacttaaaagctgtgtgacctcaagcaagtgacttaatctccgtatgtcctcctttgtcaatctgtaaaatgagactagtaatagaacttatggagttagtgtgagaattggaaggttactctacaataaagacatataaccagcatggtaaaagggttagcaattactatgtgaagaagcatccagtttctgacctcacagagattatctagcaaactcatgattttataaagaaaagaagtttctcatcaacagagactgaaatgctaccatacaatatacgttgctttttttttttttttttttttgagacggagtctcgctctgccactcaggctcaggctggagtgcagtgttgccaccttggctaattgcaacctccacctcccaggttcaagcaattctcctgcctcagtctcccaagtagctgggattataggcacccaccaccacacccagctaatttttatatttttagtagagacaaggttttgtcatgttggccagactggtctcaaactcctgacctcaggtgatccacccacctcagccttccgaagtgctggcattacaggcatgagccaccatgcccggccaatatttttaaatattataaaatattctttatcaaattgcatagaagaaaagacagtttgataggtaatagatatataaataggtcaggccaactaaaagtgtcctgaaaaaattaatattgtgaaaacaaaaggattttaatgacattgataaaatctcaccctaaaagagattaaattaaaaatcaccctacttgaaccagttcagtgagatttcattagcatgctctcattactggcataatcagcttcaaagtcactaagcctctgaaaggaagatgtgttgcttattcttaataaaatggcataaaagtagatcattagtcaccaaacatgatagacttaccttttccatttgttggcatctcacattgtagatggcaattaaaatggaatccagggaaagagggggtggtttgtatagcaatggattatgaaacaaagtactggattattcaccgcttgacattcaggaaacattctgctccttacagaatatggcacgtgggccacagaatcttccgtgtgctaccttctcggtgaagaagagcacccccaagtttcttttcctaggagctaaccacagtaaacccattacacactttagcagaagggctcattctaaaggtcttaggattttaatcattttaaatttcctgttatgcttcaggctcttcaacacaaagtgaatattgtactctttggttttacataattatattcaattgtcatatttcaacaggacattatttgtgactttagatgggtcaataatgattttcattgtcagcagtaaagtcaataattacagacacatcacctaccctacttgtgtaaaagcattttttggtactaggagatttagtgtctgatcaacggtcctggatagcaagtaatatatcccccaaataatgaaaagtgacaagaaaataaatatgtttacttcagaaataaatggaaaattagtgctatctaaaatgtagtcttaagtctcatctgtgtacataaagtaaaatgagttttatgtactagttactcaaatttatcttccactccatttgtatagtaattaaactcttacactcagtaatatacaaattggtaattaacctctttgcaaaatgttaaagtgttcctaaatgtacaataagtctcctttcctgtctcattgtttttcgcttcacgtacctctcatgtaattatttcaatgattgagttcagtgtgaggaggtttatgcctagaaaaggtgctcaccaataacgtgcctcagttcccataatagcaagatcgagaaggttctttagtctcccggaacgtcacgttgaacatctcagttctatattttgccttgacatttgcattatatcagctgatcattgtcttgccctaattttcccttttaatattttagtgaccttctatgttaggtacaggttatttagaagtgttcctccaaggccagatactttttccttgaacaatttatttttaacaacttttagcgattttctcacttcaccaccctccgtttcataagtccacgcaatcacaattcctttctgctaatctgcacagtcaagatataaagtaagaatacctatttgaacatgtagtgagaactttacttctctgccaaaaatgaaggaaaatgctgccacttttgtatgtcacatgttttttattctacagcctcactcacttcatgtcatgttttagtgcagttttctggactaactgcttattttctcattgattaaactgcctatttgctcattggaattagagccaatttttttccttgagggtctgactagaagattaaactatgttcatgtgagaatcaatttctacctaagaaatgagttagaggagttatgggcagcaatatctatctggatgctacactgtgaaaaaggaagcgaggttatgcctttctaccccaatggggtagcagagacctcaggaactgaggtagatgcccccctggttattagcgcccctgaataatttgttcaaaaattgactgctggacaggtgtcgtgttgcacgcctgtagtcccagctgtgcaggaggctgaggcaagaggatctcttgagcccaggaatttgaggctatagtaaactaaggtcacaccactatactccagcctgagcaacaaagcaagaccctgtctctaaatttaaaaaaaaatattgaatgcttatgaatagagactaatataggaagtcataagtatttccttgggatagaatgctttccaccataattgacttgacatcctgtatttttgtatgtgtggacttaagttttaaatatttgaaacacagacaattattaagtcctgcaaatgtgtgagttaatagtggatataacattcccttccagggtgtaagaaaaggtaccacagaagtgagcagccctgaagcacagcctggcctagtttggcaggtctctgtgagttagcagcagactcacgtgaccacactctgtactgccttctgtttctgtttcaccccattaattgtgctaaagaaatgcacttgacacctatgctgtgtaatctcatttagccccaatagcaacaaaagtactaaccccattaaattgagtcatttcaaactgagccaaatgttgcactccagtaaatggagtaggcattggttataatgggaattctccattattcataatggaaaccacaggagtttgttcatgcagatcaaatgtgtcccaccaaggcaagaagtatggaaaagtggtgttgctgtattaccttgtaatttcaaagccttcccgtctgaatcttatttccctgctgtttcctcttgactttggttctttcacaaaggaaaattaagaacacaaatataaacattaagttaaaacacaactgaacaaagtgccaaacttaattggagcatctgaaaatgaaacattaggcagttgcagtggcctcttgataataattcacagtaactctctgtaagctgatcctgtctgaagagcagcaggcacaaggcccctggccatgaagtccatctcaaagggccaggctcagcaaagcaggatgcaaacccaggctttccaaataccaggttggggctcatgtcactgtgccacaggagcttctgtagaaaggctacttgaaaaaagtggccattaaaaatccaggtggatcctatctagggcagtgttggaaacactgatctatgggaggaggagcaggaaggaattgtttaaccactgagcagaaatgttacattgctacctgcctttagcagctgtggctgatgggtaccagttgctaagaagagcattacctaacagtgtattaagatagaaaaatgattttaaagcacggcacttagagaatgttgaagttttactttgctttattttgatttgtttggtttgactttgtctcctggagcatcctccatggatttctgttcattacaagagaaacctagggctctaacccaattcctaattcttggacacattgcacccttgttttgtgataatccagccttcttccttgagaaggtttgctggactggaggttacatgtattgaattttctaaaatgaaggtgcaaagctgtctcctcttatttctttgtggtgctcacttcactgtgagatttcctatcaatacagcccaagtcagtgggcatgcatgaggtggagatgagggagttaggaaggacttggactctcatcaaccatcaggatccctgaatccactaactgttcataatcaaagaagtttgaacaaatacttcacacacatgaaattgccaaaattttgcatttgagttgttataccagtaagtccagttgccatcatctccttgtcacaagtgtcttaaattttgcttttgataataatgattaccactcattcagtactaacttacttgatattagacactgcattaaataccttgcaaacattattttgtttgatcctgacaaccatatgagataggtactattcttatccattaccaaaaaaattaatttcatgaagacttttcccagagagagaaactttaaatatttacacacacacctctctccctgtaacaattccgtagtcctgataacagcaaataagcaaagtctgtgtaggatgctttaccaacagtcccacctagaggcaggagagtgaaccagctagaaaatattttattcatatttcttccagaaaggctccattggagtttgaactcaatttatgttataattttcttattatttttgtattggttttcctgaaaccaatacaaagtaagaaagcattggttccactaaaaatgtcctaaaaccagccaagcacagtggctcacacctataatcccagtactttgggaggccgaggcgggtggatcacttaagccaggagttcaagactagcctggccaacatgacgaaaccccatctctactaaaaatacaaaaattagcagggtgtggtagcacacacctgtaatctcagctactcaggaagctgagacatgagaatcgcttgaacctcagaggcagagattacagtgagcagagatcacgccactgtacttctgcctgggtgacagagcgagactctatctaaaaaaaaataaacacataaatagtaaaatgtcctgaaaccattatggggttaaagcaagaggcagggctggttcccaggattttctgtctaatctccagtgagccacagacctattcctgatcaacttgagaataaacacatcagtaaagatgtgtaaggctgtctgactttcccatttctgtagaattttatttgaagagaagtttctcctttctccaggccccatattgtttatacaaaaagacctttccagtaaatgtccacaaccactaccatcaactaaaatgttttcccactaatgctttcaatggtaatcagtatttaacagggcacttaggattattttttgatcaaccattgtttagatattcccacttataattactcctgtgaaggattgcctcggggcatcagctgatcctgagaaattatccagaagccatgagtgtgtaataatttagtcttaaacctaaataggtcagtattgggtgggacttttctcagctgcataatggggagaataaaaagaatatggaaagaagttacgtaacacatcctgggtcacaaacagaggtaagacttgaacacaggcctgacatcaaagcccatgccagtatgacttacaaaaggtagactggactacctgcatttgagtcactagtgatgcttatcactgggcctcaccaaagaaccttggaatcagaatctttggaggtagatgccaggcacctgcattgttatcaagtgctccagtgattaccattcactgtacagagccaaacagactcctgatgctggaagaaaattacagtgctcaaagtgcagggcagggtgtacatctggatctaaatcactgagcaaccacagggtttcaagagagggtcaaaacaaggactttctgctctctgtggccaaggggacactaagtttgcactgttctcagatctccaaagagactttggtgtatgggggatagggaggggggaagggggtgtgaaataaaaggagaaagtgaatttgattatttgattgatgaaaattgaaaagcttattgtagggcctagcctacagttgatgaaaaaacaatggatcaggaagaagatcagaacttgtctcagtcctcaactgttttcctcaggctttggttgaatattgccatcctgtaattcattatagcattttctgttgcataaacgcttagcaacaaagcctttttttaaaaaaatttgtaactcctcaatgaggattaaatgcttcttcttctaagacagtccgaaatatactcacagctgaaaattcagctaaccgcatttcccaactagccacattctatagaaaactctaagccatgcagatgagtacagacttgacaatagtgctcaaggctgggagtactattcatctgaaaagaatgctccctccaattggtgggccgttattctgctaggtttgtgtttggataattataagatggctatgtttttcttccccagtctcaggaggcccaggtgctgaaacaattggcagagaagagggaacacgagcgagaagtccttcagaaggctttggaggagaacaacaacttcagcaagatggcggaggaaaagctgatcctgaaaatggaacaaattaaggaaaaccgtgaggctaatctagctgctattattgaacgtctgcaggaaaaggtaatctcagcagagtcctgagcagatggatatattcatatgcagcacagctgggtgaacttccatatgcctgagcacagagacgaagtcaaaatttgctgcaggtgtgaggacaactaactcccatgggcagggtctcacagtgtagcattgagttagcaggaggtgcaacatggtagagaaatgggaatccatcatgaaagctggaattttgtcaaattttcccatggtgagtggattcagggaggctgattcatgcttttgaaatgtgtaagacttctatacaagcctcacgaggcaatctgtaggaaaaatgttacactggaaatattaatgtctatatattatattgatataagtataaataacatttgatttaatatttgtttaatatatgacattaaatatatatttaattaaaatattaaattagaaaaatatatttgccagaaaaggccagggtatttatgaacactggtaagcccattctagggtataatagcatcacatgggaccatagcaaagattagctcataggggatgtttcatccagttctggtatcctggtgcccttctcttcaacaacctaaacatatattcattcccatgagtcaggaggagctgtgctggagttcttctgaaaaatgctgtctttcacttttgtactctctatgctgtctcccacctatcccctcaaaaaacctttcctttgaaaatatacagtatagctgtgagtagtttagctgtgtccgtttccagaaattggaataagcattgagaaatgggatgtttgagaaagacgcctcaatccttttctgagcagtcagtcacccttcccgccagtagcaagtgcctttgtgtgataggcattggagatgcagagcaaaacaggagtgtgcctgtcatcagagccctgagagtttaattagatgagcctcctgttttctatttctcagagtttcatgtcttctgttagagatggcccttctcatctaaggttcaaaaaaccttatcctgaagttctgatgattctgttttcattctcagtctctgactgcaaatatccaactagaaacaaaggaaatcaggcatgaaaacttttaaagatataattgcatggagatcttcatttgtgctcgtgaggaatttttgaaagcattgctggggaagggtgtgtgggctctgatgcagcagtaagacactgaggctctcagaggtccgtggacgagtactgctgacttgggcaagaaccggaatagttacctgatgccttatccgaaacatgaaagttcggattaaatttgtatttataagctagtgtttttatactctcagaacaatgtcattgcgtttcacccaagtgagtcaagtcacgatttggaagaggcaacagaatttggctctctccaggtgatttatggcggtataggaacacatgttttactcagatacaggggagcaaagttccatttgctaaagtttactcccctgaccttcaaccagtcagtcttcctccatctgccaccactttgcacttctccagagaactaaggatgttcccgcttgaccagtgctcataacatggacagcagagggccactgtgtgatctctttgagatcactgtgactcaaccttcttctcacatcctaggccctaaaacaattaagtgaagttgctaggaacggtacctgctgatcttattgcagcattctcaattaggcctcaatgcaagatttatatcactggcagtcctggagcatttttgtttttcaaattacacatacccaaacacacggcatagcctccttttttgtttgtttgtttttttgagatagagtctcgctgtgtcgcccaggctggagtgcagtggcacgatctcagctcactgcaacctctgcctcctgggttcaagtgattctcatgtctcagcctcccaagtagctgagattacaggcgtataccaccacgcccagctaatttttgtatttttagtagagacagggttttgccgtgttggccaagctggtctcaaactcctgacctcaagtgatccacccacctcggcctcccgaagtgctgggattacaggtgtgagccaccgtgcccagccagggcatatccttcttgatttcaattgtaaaatagttcaaaaattttccatattttatctaatatttccagaagtgctagcttttaacggaccatttttttcctctgtgtgtttttttctcttcacctagcccagccatgctcagctcatttttgtactctttccactcccaaccaaatttagtgccctcccccatacatgcatacatgtacatctgcacaccacttttcctgcaaataatcaacccaaagagtgcttaaaattcctgacatcaacccacagaatctccaaggatgggacccagcatccatacattttaaaaactctccatatagttccaatatgcagccagatttgagaactagtggttcgtagcctgttctgatttaaatctcagctctcagcagtctatcccacgtcacataatgcagcccagagaaattctaggaccacatttttttctggtatttcatagctaatgaggtgcttttcaaatctaataggatctttggccagtgtcagtcaagatcttttatctcctcaataaaaaggaaataccatatttactttgatttgatgtatatcacataggtggatttaatacaaaattgtggtttacatattgtgaatgtgtatactaaaactactttgctttttcctaaaataagacaaagttttatattggaagtaatatttagcattttgtttgaatgaagttactcctattaaattagaaatttaaaagagggtcagtaataacagtaaagccaaaaggcatgacactgccaacgtaacataagctgctctgaaatctaccatatcaaaagataattatgctgggcatggtggctcacacctgtaatcccagcactttgggaggccaaggcaagagaattgcttgaagccaggagttcgagaccagcctgggaaatataatgataccttgcctcaaacaaaaattcaaaaattagccagcagtggtggcacacttgtaaaaatgcctgtagtcatagctacttcagaggctgagatgaaaggattgcttgggccaaggagttcgagactgcactccaacctgggaaatattgtgccactgcactccaacctgggaaacagaacaagaccctgtctctaaaataaaaagaaaaaaaaagatgaccacttctgaaatgacacctatcaatgagttaatcattcaatgaatatgtattgagtccctactatatgcttaggaacctttgtaatatcattaccaaccatgtctttcccaatacagacaatacaaaattcagcaataaataatatagcaccaacaattagagaataagacaacatgtagtatggtccaatatagacagtaaatacaaagacactgaataatatcagtaaaagtaaattcacatcaaggtcactacaccatgcgcccacccttatgatagccctcactggccctatcaattaagcaagagacatgatacaactctgtgcaagcttttccacaatctgcctaccattcagcactcagtcgctcttcccttcaattaagagaattgagcattcaagcatattttcaccatgatgcccataatggtatcttcaatgtcactgactgataaattcccagaaacccctcagagccccagccatgttagctcaaagcctttagctaaaactgaaagcctaaagcaaaagcagccctggctgcacttcggaatctactggacagctctttaagggattctgatttaatgtctggaatagggccaagaaccttgtattattttaaaggctcactagtaggctctaatatttagccgtggttgagaaccactgtgctaaatgtttcttaaatatgctttgtgatgtcatcataaattatattttagtattttttgtctttgttgcataagtgttctttcttcctccaaagaagaatgttacactcatttcttatttcagtttcctgttttcatagcacctcatcttaacactccaggctattatatagaaaagaatcaaatgtggagaaggctgtgggagaagggatgcctgtgccacaaaggcctgcattaggctgacctattgatgtcatatccaggactcaaaagactagtctgtggattatgactggtgaagttcaaaatgttcttattcttagagtggtatgagaagtagaaagagagagaaacagagaaggggaggagaggggaagagaggaagatgagagaaaggaaagagagggggaaacacctgttcttgacatacaggaatgattcaagacattttcttcctcccctgatgtgtccctttctcccctaacgcactatgcagcatcctgcagaaaattcaccacctgacccttttagaaaccctgagtagtaggagcgccaaatgacccaatcaagaattgcagtgagacagttagttttgaaaaatcagttaaagcatgtataatcattttaacaacaatacatctattcactaaacatataattttaatgtcaaatatttacgtgtaaacatattgaccaatctttcgatgtagttgggcccaataccttttccaaaaattgatcagttaatgggggttctatgggggtttcttttcttgccattattcacacttatgtcacattagctatgatttgcagttttaatttctttaaaattgagtagggactaaagacatctccaaaaagcctggatatagactttttacaacttttccatagcttttatagttgactcacccagtatctactaaatacttcactttctcacgtatttccaaaggtttctctccaccctcacaattttccattaatgtagtacttaattaaattagatagttaaattttcaaatgtgaattgctaaacaggtgtggaaataccattggctataatcaagcatataacacaaccatttgagaaggaaagtatgtggcaatattagggaagagccctttcctctcaagcaattcagcatttaggaaccatcagacagcaggacgatggagggaacagagagggttaacatggcaagttactgaagaggacttctactgaatcttgttgaattccccacttaatccagattgtatcatatcttctttcttttgtaattctaccatatcatcttagtcaatgccaagacttctgagctcataacatggtaacaaataccaaaggagctttcagtatcgtttagaaaggagagaagcaagtaacccagacaaacttgacaactgctttcccctatccaaccatgaagtacagtacttaggaaataaaagaaattgcttcactataattcatcatttcacttctaatatctagaaaatgtcaaatgaaaatattatagccatattttagtggcaatagtagcacataatatgatgcaacttaaaatgataaaaatattttcagggaataagattctgtgattctttccctaagaggtaattttgataatatgtacctgttttgtaaatgtcaatagtcttggggatacaggtggtgtttggttacatggaaaagttccttagtggtgatttctgagattttagtgcacccaatacccaagcagtgtacactgtacccaatatgtagtctttcatccctcgcccccactcccaaccttcccccacaagtctctaaagtccattatatcactcttatatctttgcatactcatagcttagctcccacttatgagaacatatgatagttagtgctcaattcctgagttacttcacttagaataatggcctccagctccacccaagttgctgcaaaagacactatttagttcctttttatggctgagtagtattacatggtgtatatataccacattttatttatccacttgttggtcaatggacacttaacattagttccatatctttgtaatttcaagttgtgctgctataagcatgcatgagcctgtgtctttttcatataattacttcttttcctttgggtagatacccagcagtgggattgctggatcaaatgatagttctactttcagttctttatgttttccacagtggtcatactaatttacattcccatcaacagtgtaaagtgttcccttttcatcacacccatgccaacacctattgttttttgactttttaattacggccattcttgcaggagtaaggtggtatttcattgtggttttaatttgcatttccctgatgttgacaatatttaactctttagttatagattccagctattatcaatttacacctattgcattcttctcatcttttgttttcttgtgattctgatgcacaaatatcatttgtgcaaccacttactgttgaacatgtctgatgaacacttactattgaacatgtctgatgaatgaataatgaaataggaaaagggattaaaactagcctttattaattgtttgctataggccagacatttttggatgtactatcacatttcatccaaacaacaacctaaaagaaaatactgtgattatccccatttcacatctaaggaacctggtctttaggaagattaagtcatttggccaagatcacaagtagaccacagagactagatttgaatgcaagtctgtttgactccaaacctttttactatctgcccatgacccctgatcaccaacatctcaatgtatgaacatgtgctttcttagctcacacaactcactcctgaccccttttttatattgcaagtgcatagtcattagtaaaaagaaggatttttgatgatactgacctcatcttgaatttaattaggctcatatgacagaattccatagatggaattgacatcctaggtcatatagtccaagtccttgtttatatttgatacctagtgagattaaagggacattaaaaagtaaagaaaggaaagacctcatatttcttaccttccagtagagaaatctttctatgaaatcagaggaaagaattagaggaccagaatttttcctaaaatcaactttcatacatcttttttcatataaaaggcatagctgcatacaatgctaaaatattgtattacatttcctttatattgatgggaggaagggggtaaattgcagaaaacattgtaaatttagatatgcttgggcctctgacagtgcctagcaaatatcaggagatcaataatgaaataaatattatcaaagagtagtcttcttgatgaaccttctctgagtatcacaactgctttaggaacctctagattcaaggtctagtaattgcaaacagtgagctgataagaaaaacagactgtatgggaaattacatgcttcctgcatgactgccttttgttctcccacattttgatataaagtcacattaacagttcatgagtaaatattcgataatgtgaacgtaaagtgttcaaataatagagtgactaaaatgcctgaaaacaaataatttttaattagaaactcataatcatttattttctctttttccacattatctcaagctcacaaattatatttattctttcctatggcaaaatccattttgttaacactaattttgagtttaacaagaagtgtactccaaagtagcctaataatactaattataatgtttcctgctatgttatcagtttgaatttatatgaatctttagacttgaggcttctttttcctagcatagtgatggtctgggctttttctcaatttttgccagagctcagctctcactaattagtttctttctgcatgagaaaaagattttgcttcatctttttccttataatagcagaacaaaaagaagaatcagctgcatccatgctaatttcccctgtgacatttccaaacaggatttgatttctctatgcatgcctctttccttctcttcatggtttttgaacatatacaaaagctcatttaaaccaattaaataaaattgtttttaatctctttctctagagtcaacttcctgcttactccaactctgtatctttgaaggaagtatagggtggtctatgccttttttctcccagaatctacacttgaaaagacacatttttccatgcaactataaaatgttctcctcactcaacattgaaattgtatagcagtgattaagagagtgagctgtagagccaggttccctgggtttaaatcccacttgttagtatcatgaagatgggcaagttacttacccttcctgtgtttcagtttcttcatctgcaaaatggggacaataatagaatgtccactataagattattgtgaggattaagggaattaatacaggtaaaacgtgtactgatgcaggtctggtacacattaagtgcctaataaatattcagtattatgatataaagaaccctataagtgtagactccttgagattaatagagtttaacgataagttttactttatagctggtcaagtttatttcttctgaactaaaagaatctatagagtctcaatttctggagcttcagagggaaggagagaagcaatgtaagcaacattctacagaaatataaataatactactaataattagcatcttaaaatttcaattcaatgaacatttatttagcgcctatgatatatgcaagacagtttgattttagtcatctgatgtatagccacatactaaaaaatactgattttagtcatctgatgtatagccacatactaaaaaatacttcctccatcagttccctcctcaggaagttcagttcccaatcccaggctagtaccttggttccttatgtaaataaacatccaccaattacatgctatctgcaaagcactctgctaggccctgcaaatggaaaaaaaaatgataaaacatagtccaggccctcaatgagcttacagtcaaatataatagaggagacaagaacagagaggctcataatacaactagaataaaatgactgccgaataaaaggaaagatttatgcaggtgttcaaatggaaagtgagataagtttgcaggttagtctttgcagtctcataaaaatctttatggagaaaaggacaatggtcatagggcttaaagagtaagtttataatcctgaccagtggagatgaaagactagcattgaaaattgcatgacaagacaattccattaaactgaaacatcaagtgtgtgtaggaaaagatgggggttatgactggaaacgtcacttggactgcaattatgaagggccttgacaaacaggtcaagagtttaagaagcagtatagaaagtcttcgtcctggatctagccctcccagagtgtccatcaggattataaagtccttaaaatattagtcaaaaggaacgacatcattagaaatgatagagaaacaataatgtgatgttttattacctttctctggatttatactctgatcctaatattcaaaactatcttaataacatgaacttttggtcatagttttaaacaaaaacagtgttaaatatattttttaaaacacagtaagtcttgtaagatcttttctaacatgacattttgcagggcccatattttccttctgaaatgggaaaaattcataaaagtagacaccaaactgggttacttctagtcaagcgcatggtacgcaaaggaccagacaaaaagggcctgtgacatttcttcttccttttgtgttttttaggagaggcatgctgcggaggtgcgcaggaacaaggaactccaggttgaactgtctggctgaagcaagggagggtctggcacgccccaccaatagtaaatccccctgcctatattataatggatcatgcgatatcaggatggggaatgtatgacatggtttaaaaagaactcattataaaaaaaaaaaaacaaaaaaaatcaaaaattaaaaaaaatcaatgcggtctctttgcagaatgttttgcttgatgtttaaaaaataccttggatcttattttgtaaatacttacatttttgttaaaaaatacaagtattgcattatgcaagttatttcataatcttacatgtcctgtaacaggcttttgatgttgtgtctttccactcaaatgaatttgctaggtctgttctttttgaagctccccatgtctaactccattccaaaagaaaaatgaggtcagtagacagtctatggtgctagaaacccaccattgcctaatgacctagaaggctttgttgtctctgagcttgactaagaccatacctagatcacaggtattatgactccacatgaaccttcacatttgttcgctcataatctacttactgcctaaaaactacaaaaccaggctaagaaataccaccagtcatagcatttacttctgcttctcctggattatgtgctacaaatgtgctttggctttagaaagggatggatgagaagacagacctgagaccaatctgggtagaagcaaaaagttgaaccttttaaagtgctgaacacaaatccaaattcgaatggttcaagcagccgtgaaatcgctcttcataaagtgggcttaattctctagtttaagttcttttgatggaatgaattaattaatgtgtcaggtggcttatttgtggatgccatgattgatgatgttcattttaagctcttacctatagtacaagtacatgatgctactgaatatttttccacttggaaactgtgagctggttgttgcattaaaacacacatacaaacaaaatcaaaaacactgcggactttcactcaagctggtctttcttccccagtgtaaggcaatcctgcctactaacaacaccaacaacaaaacactccatctgtgaagctgacgcagttaagggggctaggcagggcatttgtgccaactaagaatcaccagatacccaccataagtacctatcgcagttttgaagtcgtttctccccaactcccaactcctgaaggttgctgcctgcatatttactcttcattagtgctattttcctgtatgtcattgtgagcaagctgtgattaataaagaattggagttctgtgaactaataaaggtttggtctgtt

SEQ ID NO: 1342 - DNA, 23 bp, synthetic construct
  source 1..23: mol_type = other DNA
atccaattaagagagagtgatgg

SEQ ID NO: 1343 - DNA, 23 bp, synthetic construct
  source 1..23: mol_type = other DNA
aatccaattaagagagagtgatg

SEQ ID NO: 1344 - DNA, 23 bp, synthetic construct
  source 1..23: mol_type = other DNA
tccaattaagagagagtgatggg

SEQ ID NO: 1345 - DNA, 23 bp, synthetic construct
  source 1..23: mol_type = other DNA
gagtcctgcaatatgaatataat

SEQ ID NO: 1346 - DNA, 23 bp, synthetic construct
  source 1..23: mol_type = other DNA
gtcctgcaatatgaatataattt

SEQ ID NO: 1347 - DNA, 23 bp, synthetic construct
  source 1..23: mol_type = other DNA
gtcttctgccgagtcctgcaata

SEQ ID NO: 1348 - DNA, 23 bp, synthetic construct
  source 1..23: mol_type = other DNA
gcacacatgctcacacagagagc

SEQ ID NO: 1349 - DNA, 23 bp, synthetic construct
  source 1..23: mol_type = other DNA
acacatgctcacacagagagcca

SEQ ID NO: 1350 - DNA, 21 bp, synthetic construct
  source 1..21: mol_type = other DNA
tccaattaagagagagtgatg

SEQ ID NO: 1351 - DNA, 21 bp, synthetic construct
  source 1..21: mol_type = other DNA
aatccaattaagagagagtga

SEQ ID NO: 1352 - DNA, 21 bp, synthetic construct
  source 1..21: mol_type = other DNA
caattaagagagagtgatggg

SEQ ID NO: 1353 - DNA, 21 bp, synthetic construct
  source 1..21: mol_type = other DNA
gtcctgcaatatgaatataat

SEQ ID NO: 1354 - DNA, 21 bp, synthetic construct
  source 1..21: mol_type = other DNA
gagtcctgcaatatgaatata

SEQ ID NO: 1355 - DNA, 21 bp, synthetic construct
  source 1..21: mol_type = other DNA
cctgcaatatgaatataattt

SEQ ID NO: 1356 - DNA, 21 bp, synthetic construct
  source 1..21: mol_type = other DNA
aggtcttctgccgagtcctgc

SEQ ID NO: 1357 - DNA, 21 bp, synthetic construct
  source 1..21: mol_type = other DNA
cttctgccgagtcctgcaata

SEQ ID NO: 1358 - DNA, 21 bp, synthetic construct
  source 1..21: mol_type = other DNA
acacatgctcacacagagagc

SEQ ID NO: 1359 - DNA, 21 bp, synthetic construct
  source 1..21: mol_type = other DNA
gcacacatgctcacacagaga

SEQ ID NO: 1360 - DNA, 21 bp, synthetic construct
  source 1..21: mol_type = other DNA
acatgctcacacagagagcca

SEQ ID NO: 1361 - DNA, 19 bp, synthetic construct
  source 1..19: mol_type = other DNA
ccaattaagagagagtgat

SEQ ID NO: 1362 - DNA, 19 bp, synthetic construct
  source 1..19: mol_type = other DNA
gagtcctgcaatatgaata

SEQ ID NO: 1363 - DNA, 19 bp, synthetic construct
  source 1..19: mol_type = other DNA
tgcaatatgaatataattt

SEQ ID NO: 1364 - DNA, 19 bp, synthetic construct
  source 1..19: mol_type = other DNA
tctgccgagtcctgcaata

SEQ ID NO: 1365 - DNA, 19 bp, synthetic construct
  source 1..19: mol_type = other DNA
gcacacatgctcacacaga

SEQ ID NO: 1366 - DNA, 19 bp, synthetic construct
  source 1..19: mol_type = other DNA
atgctcacacagagagcca

SEQ ID NO: 1367 - DNA, 23 bp, Homo sapiens
  source 1..23: mol_type = genomic DNA
ccatcactctctcttaattggat

SEQ ID NO: 1368 - DNA, 23 bp, Homo sapiens
  source 1..23: mol_type = genomic DNA
catcactctctcttaattggatt

SEQ ID NO: 1369 - DNA, 23 bp, Homo sapiens
  source 1..23: mol_type = genomic DNA
cccatcactctctcttaattgga

SEQ ID NO: 1370 - DNA, 23 bp, Homo sapiens
  source 1..23: mol_type = genomic DNA
attatattcatattgcaggactc

SEQ ID NO: 1371 - DNA, 23 bp, Homo sapiens
  source 1..23: mol_type = genomic DNA
aaattatattcatattgcaggac

SEQ ID NO: 1372 - DNA, 23 bp, Homo sapiens
  source 1..23: mol_type = genomic DNA
tattgcaggactcggcagaagac

SEQ ID NO: 1373 - DNA, 23 bp, Homo sapiens
  source 1..23: mol_type = genomic DNA
gctctctgtgtgagcatgtgtgc

SEQ ID NO: 1374 - DNA, 23 bp, Homo sapiens
  source 1..23: mol_type = genomic DNA
tggctctctgtgtgagcatgtgt

SEQ ID NO: 1375 - DNA, 21 bp, Homo sapiens
  source 1..21: mol_type = genomic DNA
catcactctctcttaattgga

SEQ ID NO: 1376 - DNA, 21 bp, Homo sapiens
  source 1..21: mol_type = genomic DNA
tcactctctcttaattggatt

SEQ ID NO: 1377 - DNA, 21 bp, Homo sapiens
  source 1..21: mol_type = genomic DNA
cccatcactctctcttaattg

SEQ ID NO: 1378 - DNA, 21 bp, Homo sapiens
  source 1..21: mol_type = genomic DNA
attatattcatattgcaggac

SEQ ID NO: 1379 - DNA, 21 bp, Homo sapiens
  source 1..21: mol_type = genomic DNA
tatattcatattgcaggactc

SEQ ID NO: 1380 - DNA, 21 bp, Homo sapiens
  source 1..21: mol_type = genomic DNA
aaattatattcatattgcagg

SEQ ID NO: 1381 - DNA, 21 bp, Homo sapiens
  source 1..21: mol_type = genomic DNA
gcaggactcggcagaagacct

SEQ ID NO: 1382 - DNA, 21 bp, Homo sapiens
  source 1..21: mol_type = genomic DNA
tattgcaggactcggcagaag

SEQ ID NO: 1383 - DNA, 21 bp, Homo sapiens
  source 1..21: mol_type = genomic DNA
gctctctgtgtgagcatgtgt

SEQ ID NO: 1384 - DNA, 21 bp, Homo sapiens
  source 1..21: mol_type = genomic DNA
tctctgtgtgagcatgtgtgc

SEQ ID NO: 1385 - DNA, 21 bp, Homo sapiens
  source 1..21: mol_type = genomic DNA
tggctctctgtgtgagcatgt

SEQ ID NO: 1386 - DNA, 19 bp, Homo sapiens
  source 1..19: mol_type = genomic DNA
atcactctctcttaattgg

SEQ ID NO: 1387 - DNA, 19 bp, Homo sapiens
  source 1..19: mol_type = genomic DNA
tattcatattgcaggactc

SEQ ID NO: 1388 - DNA, 19 bp, Homo sapiens
  source 1..19: mol_type = genomic DNA
aaattatattcatattgca

SEQ ID NO: 1389 - DNA, 19 bp, Homo sapiens
  source 1..19: mol_type = genomic DNA
tattgcaggactcggcaga

SEQ ID NO: 1390 - DNA, 19 bp, Homo sapiens
  source 1..19: mol_type = genomic DNA
tctgtgtgagcatgtgtgc

SEQ ID NO: 1391 - DNA, 19 bp, Homo sapiens
  source 1..19: mol_type = genomic DNA
tggctctctgtgtgagcat

SEQ ID NO: 1392 - RNA, 23 nt, synthetic construct
  source 1..23: mol_type = other RNA
atccaattaagagagagtgatgg

SEQ ID NO: 1393 - RNA, 23 nt, synthetic construct
  source 1..23: mol_type = other RNA
aatccaattaagagagagtgatg

SEQ ID NO: 1394 - RNA, 23 nt, synthetic construct
  source 1..23: mol_type = other RNA
tccaattaagagagagtgatggg

SEQ ID NO: 1395 - RNA, 23 nt, synthetic construct
  source 1..23: mol_type = other RNA
gagtcctgcaatatgaatataat

SEQ ID NO: 1396 - RNA, 23 nt, synthetic construct
  source 1..23: mol_type = other RNA
gtcctgcaatatgaatataattt

SEQ ID NO: 1397 - RNA, 23 nt, synthetic construct
  source 1..23: mol_type = other RNA
gtcttctgccgagtcctgcaata

SEQ ID NO: 1398 - RNA, 23 nt, synthetic construct
  source 1..23: mol_type = other RNA
gcacacatgctcacacagagagc

SEQ ID NO: 1399 - RNA, 23 nt, synthetic construct
  source 1..23: mol_type = other RNA
acacatgctcacacagagagcca

SEQ ID NO: 1400 - RNA, 21 nt, synthetic construct
  source 1..21: mol_type = other RNA
tccaattaagagagagtgatg

SEQ ID NO: 1401 - RNA, 21 nt, synthetic construct
  source 1..21: mol_type = other RNA
aatccaattaagagagagtga

SEQ ID NO: 1402 - RNA, 21 nt, synthetic construct
  source 1..21: mol_type = other RNA
caattaagagagagtgatggg

SEQ ID NO: 1403 - RNA, 21 nt, synthetic construct
  source 1..21: mol_type = other RNA
gtcctgcaatatgaatataat

SEQ ID NO: 1404 - RNA, 21 nt, synthetic construct
  source 1..21: mol_type = other RNA
gagtcctgcaatatgaatata

SEQ ID NO: 1405 - RNA, 21 nt, synthetic construct
  source 1..21: mol_type = other RNA
cctgcaatatgaatataattt

SEQ ID NO: 1406 - RNA, 21 nt, synthetic construct
  source 1..21: mol_type = other RNA
aggtcttctgccgagtcctgc

SEQ ID NO: 1407 - RNA, 21 nt, synthetic construct
  source 1..21: mol_type = other RNA
cttctgccgagtcctgcaata

SEQ ID NO: 1408 - RNA, 21 nt, synthetic construct
  source 1..21: mol_type = other RNA
acacatgctcacacagagagc

SEQ ID NO: 1409 - RNA, 21 nt, synthetic construct
  source 1..21: mol_type = other RNA
gcacacatgctcacacagaga

SEQ ID NO: 1410 - RNA, 21 nt, synthetic construct
  source 1..21: mol_type = other RNA
acatgctcacacagagagcca

SEQ ID NO: 1411 - RNA, 19 nt, synthetic construct
  source 1..19: mol_type = other RNA
ccaattaagagagagtgat

SEQ ID NO: 1412 - RNA, 19 nt, synthetic construct
  source 1..19: mol_type = other RNA
gagtcctgcaatatgaata

SEQ ID NO: 1413 - RNA, 19 nt, synthetic construct
  source 1..19: mol_type = other RNA
tgcaatatgaatataattt

SEQ ID NO: 1414 - RNA, 19 nt, synthetic construct
  source 1..19: mol_type = other RNA
tctgccgagtcctgcaata

SEQ ID NO: 1415 - RNA, 19 nt, synthetic construct
  source 1..19: mol_type = other RNA
gcacacatgctcacacaga

SEQ ID NO: 1416 - RNA, 19 nt, synthetic construct
  source 1..19: mol_type = other RNA
atgctcacacagagagcca

SEQ ID NO: 1417 - RNA, 25 nt, synthetic construct
  source 1..25: mol_type = other RNA
  modified_base 6: mod_base = OTHER; note = A nucleoside-replacement group characterized by the lack of a nucleotide base
  modified_base 11: mod_base = OTHER; note = A nucleoside-replacement group characterized by the lack of a nucleotide base
  modified_base 19: mod_base = OTHER; note = A nucleoside-replacement group characterized by the lack of a nucleotide base
aatccnattangagagagngatggg

SEQ ID NO: 1418 - RNA, 25 nt, synthetic construct
  source 1..25: mol_type = other RNA
  modified_base 7: mod_base = OTHER; note = A nucleoside-replacement group characterized by the lack of a nucleotide base
  modified_base 14: mod_base = OTHER; note = A nucleoside-replacement group characterized by the lack of a nucleotide base
  modified_base 22: mod_base = OTHER; note = A nucleoside-replacement group characterized by the lack of a nucleotide base
gagtccngcaatangaatatanttt

SEQ ID NO: 1419 - RNA, 19 nt, synthetic construct
  source 1..19: mol_type = other RNA
  modified_base 12: mod_base = OTHER; note = A nucleoside-replacement group characterized by the lack of a nucleotide base
gtccngcaatangaatata

SEQ ID NO: 1420 - RNA, 25 nt, synthetic construct
  source 1..25: mol_type = other RNA
  modified_base 8: mod_base = OTHER; note = A nucleoside-replacement group characterized by the lack of a nucleotide base
  modified_base 16: mod_base = OTHER; note = A nucleoside-replacement group characterized by the lack of a nucleotide base
  modified_base 21: mod_base = OTHER; note = A nucleoside-replacement group characterized by the lack of a nucleotide base
gcacacangctcacanagagngcca

SEQ ID NO: 1421 - DNA, 23 bp, synthetic construct
  source 1..23: mol_type = other DNA
cctgcaatatgaatataatttta

SEQ ID NO: 1422 - DNA, 23 bp, synthetic construct
  source 1..23: mol_type = other DNA
tgcaatatgaatataattttaaa

SEQ ID NO: 1423 - DNA, 23 bp, synthetic construct
  source 1..23: mol_type = other DNA
ctgcaatatgaatataattttaa

SEQ ID NO: 1424 - DNA, 21 bp, synthetic construct
  source 1..21: mol_type = other DNA
tgcaatatgaatataatttta

SEQ ID NO: 1425 - DNA, 23 bp, synthetic construct
  source 1..23: mol_type = other DNA
tcctgcaatatgaatataatttt

SEQ ID NO: 1426 - DNA, 21 bp, synthetic construct
  source 1..21: mol_type = other DNA
ctgcaatatgaatataatttt

SEQ ID NO: 1427 - DNA, 23 bp, synthetic construct
  source 1..23: mol_type = other DNA
agtcctgcaatatgaatataatt

SEQ ID NO: 1428 - DNA, 21 bp, synthetic construct
  source 1..21: mol_type = other DNA
tcctgcaatatgaatataatt

SEQ ID NO: 1429 - DNA, 23 bp, synthetic construct
  source 1..23: mol_type = other DNA
tttctctcgaaggtcttctgccg

SEQ ID NO: 1430 - DNA, 23 bp, synthetic construct
  source 1..23: mol_type = other DNA
cctttctctcgaaggtcttctgc

SEQ ID NO: 1431 - DNA, 23 bp, synthetic construct
  source 1..23: mol_type = other DNA
ctttctctcgaaggtcttctgcc

SEQ ID NO: 1432 - DNA, 23 bp, synthetic construct
  source 1..23: mol_type = other DNA
ctctcgcacacacgcacacatgc

SEQ ID NO: 1433 - DNA, 23 bp, synthetic construct
  source 1..23: mol_type = other DNA
ctctctcgcacacacgcacacat

SEQ ID NO: 1434 - DNA, 23 bp, synthetic construct
  source 1..23: mol_type = other DNA
tctctcgcacacacgcacacatg

SEQ ID NO: 1435 - DNA, 21 bp, synthetic construct
  source 1..21: mol_type = other DNA
ctctcgcacacacgcacacat

SEQ ID NO: 1436 - RNA, 23 nt, synthetic construct
  source 1..23: mol_type = other RNA
cctgcaatatgaatataatttta

SEQ ID NO: 1437 - RNA, 23 nt, synthetic construct
  source 1..23: mol_type = other RNA
tgcaatatgaatataattttaaa

SEQ ID NO: 1438 - RNA, 23 nt, synthetic construct
  source 1..23: mol_type = other RNA
ctgcaatatgaatataattttaa

SEQ ID NO: 1439 - RNA, 21 nt, synthetic construct
  source 1..21: mol_type = other RNA
tgcaatatgaatataatttta

SEQ ID NO: 1440 - RNA, 23 nt, synthetic construct
  source 1..23: mol_type = other RNA
tcctgcaatatgaatataatttt

SEQ ID NO: 1441 - RNA, 21 nt, synthetic construct
  source 1..21: mol_type = other RNA
ctgcaatatgaatataatttt

SEQ ID NO: 1442 - RNA, 23 nt, synthetic construct
  source 1..23: mol_type = other RNA
agtcctgcaatatgaatataatt

SEQ ID NO: 1443 - RNA, 21 nt, synthetic construct
  source 1..21: mol_type = other RNA
tcctgcaatatgaatataatt

SEQ ID NO: 1444 - RNA, 23 nt, synthetic construct
  source 1..23: mol_type = other RNA
tttctctcgaaggtcttctgccg

SEQ ID NO: 1445 - RNA, 23 nt, synthetic construct
  source 1..23: mol_type = other RNA
cctttctctcgaaggtcttctgc

SEQ ID NO: 1446 - RNA, 23 nt, synthetic construct
  source 1..23: mol_type = other RNA
ctttctctcgaaggtcttctgcc

SEQ ID NO: 1447 - RNA, 23 nt, synthetic construct
  source 1..23: mol_type = other RNA
ctctcgcacacacgcacacatgc

SEQ ID NO: 1448 - RNA, 23 nt, synthetic construct
  source 1..23: mol_type = other RNA
ctctctcgcacacacgcacacat

SEQ ID NO: 1449 - RNA, 23 nt, synthetic construct
  source 1..23: mol_type = other RNA
tctctcgcacacacgcacacatg

SEQ ID NO: 1450 - RNA, 21 nt, synthetic construct
  source 1..21: mol_type = other RNA
ctctcgcacacacgcacacat

SEQ ID NO: 1451 - RNA, 25 nt, synthetic construct
  source 1..25: mol_type = other RNA
  modified_base 4: mod_base = OTHER; note = A nucleoside-replacement group characterized by the lack of a nucleotide base
  modified_base 15: mod_base = OTHER; note = A nucleoside-replacement group characterized by the lack of a nucleotide base
gagncctgcaatatnaatataattt

SEQ ID NO: 1452 - RNA, 25 nt, synthetic construct
  source 1..25: mol_type = other RNA
  modified_base 11: mod_base = OTHER; note = A nucleoside-replacement group characterized by the lack of a nucleotide base
  modified_base 21: mod_base = OTHER; note = A nucleoside-replacement group characterized by the lack of a nucleotide base
gagtcctgcantatgaatatnattt

SEQ ID NO: 1453 - RNA, 25 nt, synthetic construct
  source 1..25: mol_type = other RNA
  modified_base 7: mod_base = OTHER; note = A nucleoside-replacement group characterized by the lack of a nucleotide base
  modified_base 19: mod_base = OTHER; note = A nucleoside-replacement group characterized by the lack of a nucleotide base
gagtccngcaatatgaatntaattt

SEQ ID NO: 1454 - RNA, 25 nt, synthetic construct
  source 1..25: mol_type = other RNA
  modified_base 7: mod_base = OTHER; note = A nucleoside-replacement group characterized by the lack of a nucleotide base
  modified_base 18: mod_base = OTHER; note = A nucleoside-replacement group characterized by the lack of a nucleotide base
gagtccngcaatatgaanataattt

SEQ ID NO: 1455 - RNA, 21 nt, synthetic construct
  source 1..21: mol_type = other RNA
  modified_base 8: mod_base = OTHER; note = A nucleoside-replacement group characterized by the lack of a nucleotide base
  modified_base 16: mod_base = OTHER; note = A nucleoside-replacement group characterized by the lack of a nucleotide base
gtcctgcnatatgaanataat

SEQ ID NO: 1456 - RNA, 21 nt, synthetic construct
  source 1..21: mol_type = other RNA
  modified_base 6: mod_base = OTHER; note = A nucleoside-replacement group characterized by the lack of a nucleotide base
  modified_base 14: mod_base = OTHER; note = A nucleoside-replacement group characterized by the lack of a nucleotide base
gtcctncaatatgnatataat

SEQ ID NO: 1457 - RNA, 21 nt, synthetic construct
  source 1..21: mol_type = other RNA
  modified_base 8: mod_base = OTHER; note = A nucleoside-replacement group characterized by the lack of a nucleotide base
  modified_base 14: mod_base = OTHER; note = A nucleoside-replacement group characterized by the lack of a nucleotide base
gtcctgcnatatgnatataat

SEQ ID NO: 1458 - RNA, 25 nt, synthetic construct
  source 1..25: mol_type = other RNA
  modified_base 4: mod_base = OTHER; note = A nucleoside-replacement group characterized by the lack of a nucleotide base
  modified_base 15: mod_base = OTHER; note = A nucleoside-replacement group characterized by the lack of a nucleotide base
gagncctgcaatatnaatataattt

SEQ ID NO: 1459 - RNA, 25 nt, synthetic construct
  source 1..25: mol_type = other RNA
  modified_base 11: mod_base = OTHER; note = A nucleoside-replacement group characterized by the lack of a nucleotide base
  modified_base 21: mod_base = OTHER; note = A nucleoside-replacement group characterized by the lack of a nucleotide base
gagtcctgcantatgaatatnattt

SEQ ID NO: 1460 - RNA, 25 nt, synthetic construct
  source 1..25: mol_type = other RNA
  modified_base 7: mod_base = OTHER; note = A nucleoside-replacement group characterized by the lack of a nucleotide base
  modified_base 19: mod_base = OTHER; note = A nucleoside-replacement group characterized by the lack of a nucleotide base
gagtccngcaatatgaatntaattt

SEQ ID NO: 1461 - RNA, 25 nt, synthetic construct
  source 1..25: mol_type = other RNA
  modified_base 7: mod_base = OTHER; note = A nucleoside-replacement group characterized by the lack of a nucleotide base
  modified_base 18: mod_base = OTHER; note = A nucleoside-replacement group characterized by the lack of a nucleotide base
gagtccngcaatatgaanataattt

SEQ ID NO: 1462 - RNA, 21 nt, synthetic construct
  source 1..21: mol_type = other RNA
  modified_base 8: mod_base = OTHER; note = A nucleoside-replacement group characterized by the lack of a nucleotide base
  modified_base 16: mod_base = OTHER; note = A nucleoside-replacement group characterized by the lack of a nucleotide base
gtcctgcnatatgaanataat

SEQ ID NO: 1463 - RNA, 21 nt, synthetic construct
  source 1..21: mol_type = other RNA
  modified_base 6: mod_base = OTHER; note = A nucleoside-replacement group characterized by the lack of a nucleotide base
  modified_base 14: mod_base = OTHER; note = A nucleoside-replacement group characterized by the lack of a nucleotide base
gtcctncaatatgnatataat

SEQ ID NO: 1464 - RNA, 21 nt, synthetic construct
  source 1..21: mol_type = other RNA
  modified_base 8: mod_base = OTHER; note = A nucleoside-replacement group characterized by the lack of a nucleotide base
  modified_base 14: mod_base = OTHER; note = A nucleoside-replacement group characterized by the lack of a nucleotide base
gtcctgcnatatgnatataat

SEQ ID NO: 1465 - RNA, 25 nt, synthetic construct
  source 1..25: mol_type = other RNA
  modified_base 4: mod_base = OTHER; note = A nucleoside-replacement group characterized by the lack of a nucleotide base
  modified_base 15: mod_base = OTHER; note = A nucleoside-replacement group characterized by the lack of a nucleotide base
gagncctgcaatatnaatataattt

SEQ ID NO: 1466 - RNA, 25 nt, synthetic construct
  source 1..25: mol_type = other RNA
  modified_base 11: mod_base = OTHER; note = A nucleoside-replacement group characterized by the lack of a nucleotide base
  modified_base 21: mod_base = OTHER; note = A nucleoside-replacement group characterized by the lack of a nucleotide base
gagtcctgcantatgaatatnattt

SEQ ID NO: 1467 - RNA, 25 nt, synthetic construct
  source 1..25: mol_type = other RNA
  modified_base 7: mod_base = OTHER; note = A nucleoside-replacement group characterized by the lack of a nucleotide base
  modified_base 19: mod_base = OTHER; note = A nucleoside-replacement group characterized by the lack of a nucleotide base
gagtccngcaatatgaatntaattt

SEQ ID NO: 1468 - RNA, 25 nt, synthetic construct
  source 1..25: mol_type = other RNA
  modified_base 7: mod_base = OTHER; note = A nucleoside-replacement group characterized by the lack of a nucleotide base
  modified_base 18: mod_base = OTHER; note = A nucleoside-replacement group characterized by the lack of a nucleotide base
gagtccngcaatatgaanataattt

SEQ ID NO: 1469 - RNA, 21 nt, synthetic construct
  source 1..21: mol_type = other RNA
  modified_base 8: mod_base = OTHER; note = A nucleoside-replacement group characterized by the lack of a nucleotide base
  modified_base 16: mod_base = OTHER; note = A nucleoside-replacement group characterized by the lack of a nucleotide base
gtcctgcnatatgaanataat

SEQ ID NO: 1470 - RNA, 21 nt, synthetic construct
  source 1..21: mol_type = other RNA
  modified_base 6: mod_base = OTHER; note = A nucleoside-replacement group characterized by the lack of a nucleotide base
  modified_base 14: mod_base = OTHER; note = A nucleoside-replacement group characterized by the lack of a nucleotide base
gtcctncaatatgnatataat

SEQ ID NO: 1471 - RNA, 21 nt, synthetic construct
  source 1..21: mol_type = other RNA
  modified_base 8: mod_base = OTHER; note = A nucleoside-replacement group characterized by the lack of a nucleotide base
  modified_base 14: mod_base = OTHER; note = A nucleoside-replacement group characterized by the lack of a nucleotide base
gtcctgcnatatgnatataat

SEQ ID NO: 1472 - RNA, 25 nt, synthetic construct
  source 1..25: mol_type = other RNA
  modified_base 4: mod_base = OTHER; note = A nucleoside-replacement group characterized by the lack of a nucleotide base
  modified_base 15: mod_base = OTHER; note = A nucleoside-replacement group characterized by the lack of a nucleotide base
gagncctgcaatatnaatataattt

SEQ ID NO: 1473 - RNA, 25 nt, synthetic construct
  source 1..25: mol_type = other RNA
  modified_base 11: mod_base = OTHER; note = A nucleoside-replacement group characterized by the lack of a nucleotide base
  modified_base 21: mod_base = OTHER; note = A nucleoside-replacement group characterized by the lack of a nucleotide base
gagtcctgcantatgaatatnattt

SEQ ID NO: 1474 - RNA, 25 nt, synthetic construct
  source 1..25: mol_type = other RNA
  modified_base 7: mod_base = OTHER; note = A nucleoside-replacement group characterized by the lack of a nucleotide base
  modified_base 19: mod_base = OTHER; note = A nucleoside-replacement group characterized by the lack of a nucleotide base
gagtccngcaatatgaatntaattt

SEQ ID NO: 1475 - RNA, 25 nt, synthetic construct
  source 1..25: mol_type = other RNA
  modified_base 7: mod_base = OTHER; note = A nucleoside-replacement group characterized by the lack of a nucleotide base
  modified_base 18: mod_base = OTHER; note = A nucleoside-replacement group characterized by the lack of a nucleotide base
gagtccngcaatatgaanataattt

SEQ ID NO: 1476 - RNA, 21 nt, synthetic construct
  source 1..21: mol_type = other RNA
  modified_base 8: mod_base = OTHER; note = A nucleoside-replacement group characterized by the lack of a nucleotide base
  modified_base 16: mod_base = OTHER; note = A nucleoside-replacement group characterized by the lack of a nucleotide base
gtcctgcnatatgaanataat

SEQ ID NO: 1477 - RNA, 21 nt, synthetic construct
  source 1..21: mol_type = other RNA
  modified_base 6: mod_base = OTHER; note = A nucleoside-replacement group characterized by the lack of a nucleotide base
  modified_base 14: mod_base = OTHER; note = A nucleoside-replacement group characterized by the lack of a nucleotide base
gtcctncaatatgnatataat

SEQ ID NO: 1478 - RNA, 21 nt, synthetic construct
  source 1..21: mol_type = other RNA
  modified_base 8: mod_base = OTHER; note = A nucleoside-replacement group characterized by the lack of a nucleotide base
  modified_base 14: mod_base = OTHER; note = A nucleoside-replacement group characterized by the lack of a nucleotide base
gtcctgcnatatgnatataat

SEQ ID NO: 1479 - RNA, 25 nt, synthetic construct
  source 1..25: mol_type = other RNA
  modified_base 4: mod_base = OTHER; note = A nucleoside-replacement group characterized by the lack of a nucleotide base
  modified_base 15: mod_base = OTHER; note = A nucleoside-replacement group characterized by the lack of a nucleotide base
gagncctgcaatatnaatataattt

SEQ ID NO: 1480 - RNA, 25 nt, synthetic construct
  source 1..25: mol_type = other RNA
  modified_base 11: mod_base = OTHER; note = A nucleoside-replacement group characterized by the lack of a nucleotide base
  modified_base 21: mod_base = OTHER; note = A nucleoside-replacement group characterized by the lack of a nucleotide base
gagtcctgcantatgaatatnattt

SEQ ID NO: 1481 - RNA, 25 nt, synthetic construct
  source 1..25: mol_type = other RNA
  modified_base 7: mod_base = OTHER; note = A nucleoside-replacement group characterized by the lack of a nucleotide base
  modified_base 19: mod_base = OTHER; note = A nucleoside-replacement group characterized by the lack of a nucleotide base
gagtccngcaatatgaatntaattt

SEQ ID NO: 1482 - RNA, 25 nt, synthetic construct
  source 1..25: mol_type = other RNA
  modified_base 7: mod_base = OTHER; note = A nucleoside-replacement group characterized by the lack of a nucleotide base
  modified_base 18: mod_base = OTHER; note = A nucleoside-replacement group characterized by the lack of a nucleotide base
gagtccngcaatatgaanataattt

SEQ ID NO: 1483 - RNA, 21 nt, synthetic construct
  source 1..21: mol_type = other RNA
  modified_base 8: mod_base = OTHER; note = A nucleoside-replacement group characterized by the lack of a nucleotide base
  modified_base 16: mod_base = OTHER; note = A nucleoside-replacement group characterized by the lack of a nucleotide base
gtcctgcnatatgaanataat

SEQ ID NO: 1484 - RNA, 21 nt, synthetic construct
  source 1..21: mol_type = other RNA
  modified_base 6: mod_base = OTHER; note = A nucleoside-replacement group characterized by the lack of a nucleotide base
  modified_base 14: mod_base = OTHER; note = A nucleoside-replacement group characterized by the lack of a nucleotide base
gtcctncaatatgnatataat

SEQ ID NO: 1485 - RNA, 21 nt, synthetic construct
  source 1..21: mol_type = other RNA
  modified_base 8: mod_base = OTHER; note = A nucleoside-replacement group characterized by the lack of a nucleotide base
  modified_base 14: mod_base = OTHER; note = A nucleoside-replacement group characterized by the lack of a nucleotide base
gtcctgcnatatgnatataat

SEQ ID NO: 1486 - RNA, 25 nt, synthetic construct
  source 1..25: mol_type = other RNA
cctttctctcgaaggtcttctgccg

SEQ ID NO: 1487 - RNA, 25 nt, synthetic construct
  source 1..25: mol_type = other RNA
  modified_base 9: mod_base = OTHER; note = A nucleoside-replacement group characterized by the lack of a nucleotide base
  modified_base 21: mod_base = OTHER; note = A nucleoside-replacement group characterized by the lack of a nucleotide base
cctttctcncgaaggtcttcngccg

SEQ ID NO: 1488 - RNA, 23 nt, synthetic construct
  source 1..23: mol_type = other RNA
  modified_base 8: mod_base = OTHER; note = A nucleoside-replacement group characterized by the lack of a nucleotide base
  modified_base 16: mod_base = OTHER; note = A nucleoside-replacement group characterized by the lack of a nucleotide base
ctttctcncgaaggtnttctgcc

SEQ ID NO: 1489 - RNA, 23 nt, synthetic construct
  source 1..23: mol_type = other RNA
  modified_base 8: mod_base = OTHER; note = A nucleoside-replacement group characterized by the lack of a nucleotide base
  modified_base 16: mod_base = OTHER; note = A nucleoside-replacement group characterized by the lack of a nucleotide base
tttctctngaaggtcntctgccg

SEQ ID NO: 1490 - RNA, 23 nt, synthetic construct
  source 1..23: mol_type = other RNA
tttctctcgaaggtcttctgccg

SEQ ID NO: 1491 - RNA, 23 nt, synthetic construct
  source 1..23: mol_type = other RNA
cctttctctcgaaggtcttctgc

SEQ ID NO: 1492 - RNA, 25 nt, synthetic construct
  source 1..25: mol_type = other RNA
  modified_base 9: mod_base = OTHER; note = A nucleoside-replacement group characterized by the lack of a nucleotide base
  modified_base 21: mod_base = OTHER; note = A nucleoside-replacement group characterized by the lack of a nucleotide base
cctttctcncgaaggtcttcngccg

SEQ ID NO: 1493 - RNA, 23 nt, synthetic construct
  source 1..23: mol_type = other RNA
  modified_base 8: mod_base = OTHER; note = A nucleoside-replacement group characterized by the lack of a nucleotide base
  modified_base 16: mod_base = OTHER; note = A nucleoside-replacement group characterized by the lack of a nucleotide base
ctttctcncgaaggtnttctgcc

SEQ ID NO: 1494 - RNA, 23 nt, synthetic construct
  source 1..23: mol_type = other RNA
  modified_base 8: mod_base = OTHER; note = A nucleoside-replacement group characterized by the lack of a nucleotide base
  modified_base 16: mod_base = OTHER; note = A nucleoside-replacement group characterized by the lack of a nucleotide base
tttctctngaaggtcntctgccg

SEQ ID NO: 1495 - RNA, 25 nt, synthetic construct
  source 1..25: mol_type = other RNA
  modified_base 9: mod_base = OTHER; note = A nucleoside-replacement group characterized by the lack of a nucleotide base
  modified_base 21: mod_base = OTHER; note = A nucleoside-replacement group characterized by the lack of a nucleotide base
cctttctcncgaaggtcttcngccg

SEQ ID NO: 1496 - RNA, 23 nt, synthetic construct
  source 1..23: mol_type = other RNA
  modified_base 8: mod_base = OTHER; note = A nucleoside-replacement group characterized by the lack of a nucleotide base
  modified_base 16: mod_base = OTHER; note = A nucleoside-replacement group characterized by the lack of a nucleotide base
ctttctcncgaaggtnttctgcc

SEQ ID NO: 1497 - RNA, 23 nt, synthetic construct
  source 1..23: mol_type = other RNA
  modified_base 8: mod_base = OTHER; note = A nucleoside-replacement group characterized by the lack of a nucleotide base
  modified_base 16: mod_base = OTHER; note = A nucleoside-replacement group characterized by the lack of a nucleotide base
tttctctngaaggtcntctgccg

SEQ ID NO: 1498 - RNA, 25 nt, synthetic construct
  source 1..25: mol_type = other RNA
  modified_base 9: mod_base = OTHER; note = A nucleoside-replacement group characterized by the lack of a nucleotide base
  modified_base 21: mod_base = OTHER; note = A nucleoside-replacement group characterized by the lack of a nucleotide base
cctttctcncgaaggtcttcngccg

SEQ ID NO: 1499 - RNA, 23 nt, synthetic construct
  source 1..23: mol_type = other RNA
  modified_base 8: mod_base = OTHER; note = A nucleoside-replacement group characterized by the lack of a nucleotide base
  modified_base 16: mod_base = OTHER; note = A nucleoside-replacement group characterized by the lack of a nucleotide base
ctttctcncgaaggtnttctgcc

SEQ ID NO: 1500 - RNA, 23 nt, synthetic construct
  source 1..23: mol_type = other RNA
  modified_base 8: mod_base = OTHER; note = A nucleoside-replacement group characterized by the lack of a nucleotide base
  modified_base 16: mod_base = OTHER; note = A nucleoside-replacement group characterized by the lack of a nucleotide base
tttctctngaaggtcntctgccg

SEQ ID NO: 1501 - RNA, 25 nt, synthetic construct
  source 1..25: mol_type = other RNA
  modified_base 9: mod_base = OTHER; note = A nucleoside-replacement group characterized by the lack of a nucleotide base
  modified_base 21: mod_base = OTHER; note = A nucleoside-replacement group characterized by the lack of a nucleotide base
cctttctcncgaaggtcttcngccg

SEQ ID NO: 1502 - RNA, 23 nt, synthetic construct
  source 1..23: mol_type = other RNA
  modified_base 8: mod_base = OTHER; note = A nucleoside-replacement group characterized by the lack of a nucleotide base
  modified_base 16: mod_base = OTHER; note = A nucleoside-replacement group characterized by the lack of a nucleotide base
ctttctcncgaaggtnttctgcc

SEQ ID NO: 1503 - RNA, 23 nt, synthetic construct
  source 1..23: mol_type = other RNA
  modified_base 8: mod_base = OTHER; note = A nucleoside-replacement group characterized by the lack of a nucleotide base
  modified_base 16: mod_base = OTHER; note = A nucleoside-replacement group characterized by the lack of a nucleotide base
tttctctngaaggtcntctgccg

SEQ ID NO: 1504 - RNA, 25 nt, synthetic construct
  source 1..25: mol_type = other RNA
  modified_base 9: mod_base = OTHER; note = A nucleoside-replacement group characterized by the lack of a nucleotide base
  modified_base 21: mod_base = OTHER; note = A nucleoside-replacement group characterized by the lack of a nucleotide base
cctttctcncgaaggtcttcngccg

SEQ ID NO: 1505 - RNA, 23 nt, synthetic construct
  source 1..23: mol_type = other RNA
  modified_base 8: mod_base = OTHER; note = A nucleoside-replacement group characterized by the lack of a nucleotide base
  modified_base 16: mod_base = OTHER; note = A nucleoside-replacement group characterized by the lack of a nucleotide base
ctttctcncgaaggtnttctgcc

SEQ ID NO: 1506 - RNA, 23 nt, synthetic construct
  source 1..23: mol_type = other RNA
  modified_base 8: mod_base = OTHER; note = A nucleoside-replacement group characterized by the lack of a nucleotide base
  modified_base 16: mod_base = OTHER; note = A nucleoside-replacement group characterized by the lack of a nucleotide base
tttctctngaaggtcntctgccg

SEQ ID NO: 1507 - RNA, 25 nt, synthetic construct
  source 1..25: mol_type = other RNA
  modified_base 9: mod_base = OTHER; note = A nucleoside-replacement group characterized by the lack of a nucleotide base
  modified_base 21: mod_base = OTHER; note = A nucleoside-replacement group characterized by the lack of a nucleotide base
cctttctcncgaaggtcttcngccg

SEQ ID NO: 1508 - RNA, 23 nt, synthetic construct
  source 1..23: mol_type = other RNA
  modified_base 8: mod_base = OTHER; note = A nucleoside-replacement group characterized by the lack of a nucleotide base
  modified_base 16: mod_base = OTHER; note = A nucleoside-replacement group characterized by the lack of a nucleotide base
ctttctcncgaaggtnttctgcc

SEQ ID NO: 1509 - RNA, 23 nt, synthetic construct
  source 1..23: mol_type = other RNA
  modified_base 8: mod_base = OTHER; note = A nucleoside-replacement group characterized by the lack of a nucleotide base
  modified_base 16: mod_base = OTHER; note = A nucleoside-replacement group characterized by the lack of a nucleotide base
tttctctngaaggtcntctgccg

SEQ ID NO: 1510 - RNA, 25 nt, synthetic construct
  source 1..25: mol_type = other RNA
  modified_base 4: mod_base = OTHER; note = A nucleoside-replacement group characterized by the lack of a nucleotide base
  modified_base 15: mod_base = OTHER; note = A nucleoside-replacement group characterized by the lack of a nucleotide base
gagncctgcaatatnaatataattt

SEQ ID NO: 1511 - RNA, 25 nt, synthetic construct
  source 1..25: mol_type = other RNA
  modified_base 11: mod_base = OTHER; note = A nucleoside-replacement group characterized by the lack of a nucleotide base
  modified_base 21: mod_base = OTHER; note = A nucleoside-replacement group characterized by the lack of a nucleotide base
gagtcctgcantatgaatatnattt

SEQ ID NO: 1512 - RNA, 25 nt, synthetic construct
  source 1..25: mol_type = other RNA
  modified_base 7: mod_base = OTHER; note = A nucleoside-replacement group characterized by the lack of a nucleotide base
  modified_base 19: mod_base = OTHER; note = A nucleoside-replacement group characterized by the lack of a nucleotide base
gagtccngcaatatgaatntaattt

SEQ ID NO: 1513 - RNA, 25 nt, synthetic construct
  source 1..25: mol_type = other RNA
  modified_base 7: mod_base = OTHER; note = A nucleoside-replacement group characterized by the lack of a nucleotide base
  modified_base 18: mod_base = OTHER; note = A nucleoside-replacement group characterized by the lack of a nucleotide base
gagtccngcaatatgaanataattt

SEQ ID NO: 1514 - RNA, 21 nt, synthetic construct
  source 1..21: mol_type = other RNA
  modified_base 8: mod_base = OTHER; note = A nucleoside-replacement group characterized by the lack of a nucleotide base
  modified_base 16: mod_base = OTHER; note = A nucleoside-replacement group characterized by the lack of a nucleotide base
gtcctgcnatatgaanataat

SEQ ID NO: 1515 - RNA, 21 nt, synthetic construct
  source 1..21: mol_type = other RNA
  modified_base 8: mod_base = OTHER; note = A nucleoside-replacement group characterized by the lack of a nucleotide base
  modified_base 14: mod_base = OTHER; note = A nucleoside-replacement group characterized by the lack of a nucleotide base
gtcctgcnatatgnatataat

SEQ ID NO: 1516 - RNA, 21 nt, synthetic construct
  source 1..21: mol_type = other RNA
  modified_base 6: mod_base = OTHER; note = A nucleoside-replacement group characterized by the lack of a nucleotide base
  modified_base 14: mod_base = OTHER; note = A nucleoside-replacement group characterized by the lack of a nucleotide base
gtcctncaatatgnatataat

SEQ ID NO: 1517 - RNA, 25 nt, synthetic construct
  source 1..25: mol_type = other RNA
  modified_base 7: mod_base = OTHER; note = A nucleoside-replacement group characterized by the lack of a nucleotide base
  modified_base 19: mod_base = OTHER; note = A nucleoside-replacement group characterized by the lack of a nucleotide base
gagtccngcaatatgaatntaattt

SEQ ID NO: 1518 - RNA, 25 nt, synthetic construct
  source 1..25: mol_type = other RNA
  modified_base 7: mod_base = OTHER; note = A nucleoside-replacement group characterized by the lack of a nucleotide base
  modified_base 18: mod_base = OTHER; note = A nucleoside-replacement group characterized by the lack of a nucleotide base
gagtccngcaatatgaanataattt

SEQ ID NO: 1519 - RNA, 21 nt, synthetic construct
  source 1..21: mol_type = other RNA
  modified_base 8: mod_base = OTHER; note = A nucleoside-replacement group characterized by the lack of a nucleotide base
  modified_base 16: mod_base = OTHER; note = A nucleoside-replacement group characterized by the lack of a nucleotide base
gtcctgcnatatgaanataat

SEQ ID NO: 1520 - RNA, 21 nt, synthetic construct
  source 1..21: mol_type = other RNA
  modified_base 8: mod_base = OTHER; note = A nucleoside-replacement group characterized by the lack of a nucleotide base
  modified_base 14: mod_base = OTHER; note = A nucleoside-replacement group characterized by the lack of a nucleotide base
gtcctgcnatatgnatataat

SEQ ID NO: 1521 - RNA, 21 nt, synthetic construct
  source 1..21: mol_type = other RNA
  modified_base 6: mod_base = OTHER; note = A nucleoside-replacement group characterized by the lack of a nucleotide base
  modified_base 14: mod_base = OTHER; note = A nucleoside-replacement group characterized by the lack of a nucleotide base
gtcctncaatatgnatataat

SEQ ID NO: 1522-1588 - skipped (67 entries)

SEQ ID NO: 1589 - RNA, 25 nt, synthetic construct
  source 1..25: mol_type = other RNA
  modified_base 11: mod_base = OTHER; note = A nucleoside-replacement group characterized by the lack of a nucleotide base
  modified_base 22: mod_base = OTHER; note = A nucleoside-replacement group characterized by the lack of a nucleotide base
aatccaattangagagagtganggg

SEQ ID NO: 1590 - RNA, 25 nt, synthetic construct
  source 1..25: mol_type = other RNA
  modified_base 7: mod_base = OTHER; note = A nucleoside-replacement group characterized by the lack of a nucleotide base
  modified_base 14: mod_base = OTHER; note = A nucleoside-replacement group characterized by the lack of a nucleotide base
gagtccngcaatangaatataattt

SEQ ID NO: 1591 - RNA, 25 nt, synthetic construct
  source 1..25: mol_type = other RNA
  modified_base 8: mod_base = OTHER; note = A nucleoside-replacement group characterized by the lack of a nucleotide base
  modified_base 19: mod_base = OTHER; note = A nucleoside-replacement group characterized by the lack of a nucleotide base
gcacacangctcacacagngagcca

SEQ ID NO: 1592 - RNA, 25 nt, synthetic construct
  source 1..25: mol_type = other RNA
  modified_base 8: mod_base = OTHER; note = A nucleoside-replacement group characterized by the lack of a nucleotide base
  modified_base 16: mod_base = OTHER; note = A nucleoside-replacement group characterized by the lack of a nucleotide base
  modified_base 24: mod_base = OTHER; note = A nucleoside-replacement group characterized by the lack of a nucleotide base
aatccaantaagaganagtgatgng

SEQ ID NO: 1593 - RNA, 25 nt, synthetic construct
  source 1..25: mol_type = other RNA
  modified_base 8: mod_base = OTHER; note = A nucleoside-replacement group characterized by the lack of a nucleotide base
  modified_base 16: mod_base = OTHER; note = A nucleoside-replacement group characterized by the lack of a nucleotide base
  modified_base 23: mod_base = OTHER; note = A nucleoside-replacement group characterized by the lack of a nucleotide base
aatccaantaagaganagtgatngg

SEQ ID NO: 1594 - RNA, 25 nt, synthetic construct
  source 1..25: mol_type = other RNA
  modified_base 2: mod_base = OTHER; note = A nucleoside-replacement group characterized by the lack of a nucleotide base
  modified_base 10: mod_base = OTHER; note = A nucleoside-replacement group characterized by the lack of a nucleotide base
  modified_base 18: mod_base = OTHER; note = A nucleoside-replacement group characterized by the lack of a nucleotide base
antccaattnagagagantgatggg

SEQ ID NO: 1595 - RNA, 23 nt, synthetic construct
  source 1..23: mol_type = other RNA
  modified_base 8: mod_base = OTHER; note = A nucleoside-replacement group characterized by the lack of a nucleotide base
  modified_base 16: mod_base = OTHER; note = A nucleoside-replacement group characterized by the lack of a nucleotide base
tccaattnagagagantgatggg

SEQ ID NO: 1596 - RNA, 25 nt, synthetic construct
  source 1..25: mol_type = other RNA
  modified_base 8: mod_base = OTHER; note = A nucleoside-replacement group characterized by the lack of a nucleotide base
  modified_base 16: mod_base = OTHER; note = A nucleoside-replacement group characterized by the lack of a nucleotide base
  modified_base 24: mod_base = OTHER; note = A nucleoside-replacement group characterized by the lack of a nucleotide base
gagtcctncaatatgnatataatnt

SEQ ID NO: 1597 - RNA, 25 nt, synthetic construct
  source 1..25: mol_type = other RNA
  modified_base 4: mod_base = OTHER; note = A nucleoside-replacement group characterized by the lack of a nucleotide base
  modified_base 12: mod_base = OTHER; note = A nucleoside-replacement group characterized by the lack of a nucleotide base
  modified_base 19: mod_base = OTHER; note = A nucleoside-replacement group characterized by the lack of a nucleotide base
gagncctgcaanatgaatntaattt

SEQ ID NO: 1598 - RNA, 21 nt, synthetic construct
  source 1..21: mol_type = other RNA
  modified_base 8: mod_base = OTHER; note = A nucleoside-replacement group characterized by the lack of a nucleotide base
  modified_base 16: mod_base = OTHER; note = A nucleoside-replacement group characterized by the lack of a nucleotide base
gtcctgcnatatgaanataat

SEQ ID NO: 1599 - RNA, 21 nt, synthetic construct
  source 1..21: mol_type = other RNA
  modified_base 6: mod_base = OTHER; note = A nucleoside-replacement group characterized by the lack of a nucleotide base
  modified_base 14: mod_base = OTHER; note = A nucleoside-replacement group characterized by the lack of a nucleotide base
gtcctncaatatgnatataat

SEQ ID NO: 1600 - RNA, 25 nt, synthetic construct
  source 1..25: mol_type = other RNA
  modified_base 8: mod_base = OTHER; note = A nucleoside-replacement group characterized by the lack of a nucleotide base
  modified_base 16: mod_base = OTHER; note = A nucleoside-replacement group characterized by the lack of a nucleotide base
  modified_base 23: mod_base = OTHER; note = A nucleoside-replacement group characterized by the lack of a nucleotide base
gcacacangctcacanagagagnca

SEQ ID NO: 1601 - RNA, 25 nt, synthetic construct
  source 1..25: mol_type = other RNA
  modified_base 3: mod_base = OTHER; note = A nucleoside-replacement group characterized by the lack of a nucleotide base
  modified_base 10: mod_base = OTHER; note = A nucleoside-replacement group characterized by the lack of a nucleotide base
  modified_base 18: mod_base = OTHER; note = A nucleoside-replacement group characterized by the lack of a nucleotide base
gcncacatgntcacacanagagcca

SEQ ID NO: 1602 - RNA, 23 nt, synthetic construct
  source 1..23: mol_type = other RNA
  modified_base 8: mod_base = OTHER; note = A nucleoside-replacement group characterized by the lack of a nucleotide base
  modified_base 16: mod_base = OTHER; note = A nucleoside-replacement group characterized by the lack of a nucleotide base
gcacacangctcacanagagagc

SEQ ID NO: 1603 - RNA, 25 nt, synthetic construct
  source 1..25: mol_type = other RNA
  modified_base 4: mod_base = OTHER; note = A nucleoside-replacement group characterized by the lack of a nucleotide base
  modified_base 15: mod_base = OTHER; note = A nucleoside-replacement group characterized by the lack of a nucleotide base
aatncaattaagagngagtgatggg

SEQ ID NO: 1604 - RNA, 25 nt, synthetic construct
  source 1..25: mol_type = other RNA
  modified_base 11: mod_base = OTHER; note = A nucleoside-replacement group characterized by the lack of a nucleotide base
  modified_base 21: mod_base = OTHER; note = A nucleoside-replacement group characterized by the lack of a nucleotide base
aatccaattangagagagtgntggg

SEQ ID NO: 1605 - RNA, 25 nt, synthetic construct
  source 1..25: mol_type = other RNA
  modified_base 7: mod_base = OTHER; note = A nucleoside-replacement group characterized by the lack of a nucleotide base
  modified_base 19: mod_base = OTHER; note = A nucleoside-replacement group characterized by the lack of a nucleotide base
aatccanttaagagagagngatggg

SEQ ID NO: 1606 - RNA, 25 nt, synthetic construct
  source 1..25: mol_type = other RNA
  modified_base 7: mod_base = OTHER; note = A nucleoside-replacement group characterized by the lack of a nucleotide base
  modified_base 18: mod_base = OTHER; note = A nucleoside-replacement group characterized by the lack of a nucleotide base
aatccanttaagagagantgatggg

SEQ ID NO: 1607 - RNA, 25 nt, synthetic construct
  source 1..25: mol_type = other RNA
  modified_base 8: mod_base = OTHER; note = A nucleoside-replacement group characterized by the lack of a nucleotide base
  modified_base 13: mod_base = OTHER; note = A nucleoside-replacement group characterized by the lack of a nucleotide base
  modified_base 18: mod_base = OTHER; note = A nucleoside-replacement group characterized by the lack of a nucleotide base
aatccaantaagngagantgatggg

SEQ ID NO: 1608 - RNA, 25 nt, synthetic construct
  source 1..25: mol_type = other RNA
  modified_base 4: mod_base = OTHER; note = A nucleoside-replacement group characterized by the lack of a nucleotide base
  modified_base 15: mod_base = OTHER; note = A nucleoside-replacement group characterized by the lack of a nucleotide base
gagncctgcaatatnaatataattt

SEQ ID NO: 1609 - RNA, 25 nt, synthetic construct
  source 1..25: mol_type = other RNA
  modified_base 11: mod_base = OTHER; note = A nucleoside-replacement group characterized by the lack of a nucleotide base
  modified_base 21: mod_base = OTHER; note = A nucleoside-replacement group characterized by the lack of a nucleotide base
gagtcctgcantatgaatatnattt

SEQ ID NO: 1610 - RNA, 25 nt, synthetic construct
  source 1..25: mol_type = other RNA
  modified_base 7: mod_base = OTHER; note = A nucleoside-replacement group characterized by the lack of a nucleotide base
  modified_base 19: mod_base = OTHER; note = A nucleoside-replacement group characterized by the lack of a nucleotide base
gagtccngcaatatgaatntaattt

SEQ ID NO: 1611 - RNA, 25 nt, synthetic construct
  source 1..25: mol_type = other RNA
  modified_base 7: mod_base = OTHER; note = A nucleoside-replacement group characterized by the lack of a nucleotide base
  modified_base 18: mod_base = OTHER; note = A nucleoside-replacement group characterized by the lack of a nucleotide base
gagtccngcaatatgaanataattt

SEQ ID NO: 1612 - RNA, 25 nt, synthetic construct
  source 1..25: mol_type = other RNA
  modified_base 8: mod_base = OTHER; note = A nucleoside-replacement group characterized by the lack of a nucleotide base
  modified_base 13: mod_base = OTHER; note = A nucleoside-replacement group characterized by the lack of a nucleotide base
  modified_base 18: mod_base = OTHER; note = A nucleoside-replacement group characterized by the lack of a nucleotide base
gagtcctncaatntgaanataattt

SEQ ID NO: 1613 - RNA, 25 nt, synthetic construct
  source 1..25: mol_type = other RNA
  modified_base 7: mod_base = OTHER; note = A nucleoside-replacement group characterized by the lack of a nucleotide base
  modified_base 13: mod_base = OTHER; note = A nucleoside-replacement group characterized by the lack of a nucleotide base
  modified_base 19: mod_base = OTHER; note = A nucleoside-replacement group characterized by the lack of a nucleotide base
gagtccngcaatntgaatntaattt

SEQ ID NO: 1614 - RNA, 25 nt, synthetic construct
  source 1..25: mol_type = other RNA
  modified_base 6: mod_base = OTHER; note = A nucleoside-replacement group characterized by the lack of a nucleotide base
  modified_base 13: mod_base = OTHER; note = A nucleoside-replacement group characterized by the lack of a nucleotide base
  modified_base 20: mod_base = OTHER; note = A nucleoside-replacement group characterized by the lack of a nucleotide base
gagtcntgcaatntgaatanaattt

SEQ ID NO: 1615 - RNA, 25 nt, synthetic construct
  source 1..25: mol_type = other RNA
  modified_base 5: mod_base = OTHER; note = A nucleoside-replacement group characterized by the lack of a nucleotide base
  modified_base 13: mod_base = OTHER; note = A nucleoside-replacement group characterized by the lack of a nucleotide base
  modified_base 21: mod_base = OTHER; note = A nucleoside-replacement group characterized by the lack of a nucleotide base
gagtnctgcaatntgaatatnattt

SEQ ID NO: 1616 - RNA, 21 nt, synthetic construct
  source 1..21: mol_type = other RNA
  modified_base 8: mod_base = OTHER; note = A nucleoside-replacement group characterized by the lack of a nucleotide base
  modified_base 14: mod_base = OTHER; note = A nucleoside-replacement group characterized by the lack of a nucleotide base
gtcctgcnatatgnatataat

SEQ ID NO: 1617 - RNA, 25 nt, synthetic construct
  source 1..25: mol_type = other RNA
  modified_base 9: mod_base = OTHER; note = A nucleoside-replacement group characterized by the lack of a nucleotide base
  modified_base 21: mod_base = OTHER; note = A nucleoside-replacement group characterized by the lack of a nucleotide base
cctttctcncgaaggtcttcngccg

SEQ ID NO: 1618 - RNA, 23 nt, synthetic construct
  source 1..23: mol_type = other RNA
  modified_base 8: mod_base = OTHER; note = A nucleoside-replacement group characterized by the lack of a nucleotide base
  modified_base 16: mod_base = OTHER; note = A nucleoside-replacement group characterized by the lack of a nucleotide base
ctttctcncgaaggtnttctgcc

SEQ ID NO: 1619 - RNA, 23 nt, synthetic construct
  source 1..23: mol_type = other RNA
  modified_base 8: mod_base = OTHER; note = A nucleoside-replacement group characterized by the lack of a nucleotide base
  modified_base 16: mod_base = OTHER; note = A nucleoside-replacement group characterized by the lack of a nucleotide base
tttctctngaaggtcntctgccg

SEQ ID NO: 1620 - RNA, 23 nt, synthetic construct
  source 1..23: mol_type = other RNA
  modified_base 8: mod_base = OTHER; note = A nucleoside-replacement group characterized by the lack of a nucleotide base
  modified_base 16: mod_base = OTHER; note = A nucleoside-replacement group characterized by the lack of a nucleotide base
tctctcgnacacacgnacacatg

SEQ ID NO: 1621 - RNA, 25 nt, synthetic construct
  source 1..25: mol_type = other RNA
  modified_base 8: mod_base = OTHER; note = A nucleoside-replacement group characterized by the lack of a nucleotide base
  modified_base 13: mod_base = OTHER; note = A nucleoside-replacement group characterized by the lack of a nucleotide base
  modified_base 18: mod_base = OTHER; note = A nucleoside-replacement group characterized by the lack of a nucleotide base
gcacacangctcncacanagagcca

SEQ ID NO: 1622 - RNA, 23 nt, synthetic construct
  source 1..23: mol_type = other RNA
  modified_base 8: mod_base = OTHER; note = A nucleoside-replacement group characterized by the lack of a nucleotide base
  modified_base 16: mod_base = OTHER; note = A nucleoside-replacement group characterized by the lack of a nucleotide base
tgcaatangaatatanttttaaa

SEQ ID NO: 1623 - RNA, 23 nt, synthetic construct
  source 1..23: mol_type = other RNA
  modified_base 8: mod_base = OTHER; note = A nucleoside-replacement group characterized by the lack of a nucleotide base
  modified_base 16: mod_base = OTHER; note = A nucleoside-replacement group characterized by the lack of a nucleotide base
tcctgcantatgaatntaatttt

SEQ ID NO: 1624 - RNA, 21 nt, synthetic construct
  source 1..21: mol_type = other RNA
  modified_base 11: mod_base = OTHER; note = A nucleoside-replacement group characterized by the lack of a nucleotide base
ctgcaatatgnatataatttt

SEQ ID NO: 1625 - RNA, 23 nt, synthetic construct
  source 1..23: mol_type = other RNA
  modified_base 8: mod_base = OTHER; note = A nucleoside-replacement group characterized by the lack of a nucleotide base
  modified_base 16: mod_base = OTHER; note = A nucleoside-replacement group characterized by the lack of a nucleotide base
ctgcaatntgaatatnattttaa

SEQ ID NO: 1626 - RNA, 21 nt, synthetic construct
  source 1..21: mol_type = other RNA
  modified_base 11: mod_base = OTHER; note = A nucleoside-replacement group characterized by the lack of a nucleotide base
cctgcaatatnaatataattt

SEQ ID NO: 1627 - RNA, 21 nt, synthetic construct
  source 1..21: mol_type = other RNA
  modified_base 11: mod_base = OTHER; note = A nucleoside-replacement group characterized by the lack of a nucleotide base
tcctgcaatangaatataatt

SEQ ID NO: 1628 - RNA, 21 nt, synthetic construct
  source 1..21: mol_type = other RNA
  modified_base 8: mod_base = OTHER; note = A nucleoside-replacement group characterized by the lack of a nucleotide base
  modified_base 16: mod_base = OTHER; note = A nucleoside-replacement group characterized by the lack of a nucleotide base
gtcctgcnatatgaanataat

SEQ ID NO: 1629 - RNA, 21 nt, synthetic construct
  source 1..21: mol_type = other RNA
  modified_base 6: mod_base = OTHER; note = A nucleoside-replacement group characterized by the lack of a nucleotide base
  modified_base 14: mod_base = OTHER; note = A nucleoside-replacement group characterized by the lack of a nucleotide base
gtcctncaatatgnatataat

SEQ ID NO: 1630 - RNA, 21 nt, synthetic construct
  source 1..21: mol_type = other RNA
  modified_base 8: mod_base = OTHER; note = A nucleoside-replacement group characterized by the lack of a nucleotide base
  modified_base 14: mod_base = OTHER; note = A nucleoside-replacement group characterized by the lack of a nucleotide base
gtcctgcnatatgnatataat

SEQ ID NO: 1631 - RNA, 23 nt, synthetic construct
  source 1..23: mol_type = other RNA
  modified_base 8: mod_base = OTHER; note = A nucleoside-replacement group characterized by the lack of a nucleotide base
  modified_base 16: mod_base = OTHER; note = A nucleoside-replacement group characterized by the lack of a nucleotide base
gtcctgcnatatgaanataattt

SEQ ID NO: 1632 - RNA, 25 nt, synthetic construct
  source 1..25: mol_type = other RNA
  modified_base 15: mod_base = OTHER; note = A nucleoside-replacement group characterized by the lack of a nucleotide base
gagtcctgcaatatnaatataattt

SEQ ID NO: 1633 - RNA, 23 nt, synthetic construct
  source 1..23: mol_type = other RNA
  misc_feature 1..23: note = Phosphorothioate linkage
  modified_base 8: mod_base = OTHER; note = A nucleoside-replacement group characterized by the lack of a nucleotide base
  modified_base 16: mod_base = OTHER; note = A nucleoside-replacement group characterized by the lack of a nucleotide base
gtcttctnccgagtcntgcaata

SEQ ID NO: 1634 - RNA, 23 nt, synthetic construct
  source 1..23: mol_type = other RNA
  modified_base 12: mod_base = OTHER; note = A nucleoside-replacement group characterized by the lack of a nucleotide base
gtcttctgccgngtcctgcaata

SEQ ID NO: 1635 - RNA, 25 nt, synthetic construct
  source 1..25: mol_type = other RNA
  modified_base 9: mod_base = OTHER; note = A nucleoside-replacement group characterized by the lack of a nucleotide base
  modified_base 19: mod_base = OTHER; note = A nucleoside-replacement group characterized by the lack of a nucleotide base
aggtcttcngccgagtccngcaata

SEQ ID NO: 1636 - RNA, 21 nt, synthetic construct
  source 1..21: mol_type = other RNA
  modified_base 8: mod_base = OTHER; note = A nucleoside-replacement group characterized by the lack of a nucleotide base
  modified_base 16: mod_base = OTHER; note = A nucleoside-replacement group characterized by the lack of a nucleotide base
gtcctgcnatatgaanataat

SEQ ID NO: 1637 - RNA, 21 nt, synthetic construct
  source 1..21: mol_type = other RNA
  modified_base 6: mod_base = OTHER; note = A nucleoside-replacement group characterized by the lack of a nucleotide base
  modified_base 14: mod_base = OTHER; note = A nucleoside-replacement group characterized by the lack of a nucleotide base
gtcctncaatatgnatataat

SEQ ID NO: 1638 - RNA, 21 nt, synthetic construct
  source 1..21: mol_type = other RNA
  modified_base 8: mod_base = OTHER; note = A nucleoside-replacement group characterized by the lack of a nucleotide base
  modified_base 14: mod_base = OTHER; note = A nucleoside-replacement group characterized by the lack of a nucleotide base
gtcctgcnatatgnatataat

SEQ ID NO: 1639 - RNA, 23 nt, synthetic construct
  source 1..23: mol_type = other RNA
  modified_base 8: mod_base = OTHER; note = A nucleoside-replacement group characterized by the lack of a nucleotide base
  modified_base 16: mod_base = OTHER; note = A nucleoside-replacement group characterized by the lack of a nucleotide base
gtcttctnccgagtcntgcaata

SEQ ID NO: 1640 - RNA, 23 nt, synthetic construct
  source 1..23: mol_type = other RNA
  modified_base 12: mod_base = OTHER; note = A nucleoside-replacement group characterized by the lack of a nucleotide base
gtcttctgccgngtcctgcaata

SEQ ID NO: 1641 - RNA, 23 nt, synthetic construct
  source 1..23: mol_type = other RNA
  modified_base 12: mod_base = OTHER; note = A nucleoside-replacement group characterized by the lack of a nucleotide base
gtcttctgccgngtcctgcaata

SEQ ID NO: 1642 - RNA, 25 nt, synthetic construct
  source 1..25: mol_type = other RNA
  modified_base 9: mod_base = OTHER; note = A nucleoside-replacement group characterized by the lack of a nucleotide base
  modified_base 21: mod_base = OTHER; note = A nucleoside-replacement group characterized by the lack of a nucleotide base
cctttctcncgaaggtcttcngccg

SEQ ID NO: 1643 - RNA, 25 nt, synthetic construct
  source 1..25: mol_type = other RNA
  modified_base 9: mod_base = OTHER; note = A nucleoside-replacement group characterized by the lack of a nucleotide base
  modified_base 21: mod_base = OTHER; note = A nucleoside-replacement group characterized by the lack of a nucleotide base
cctttctcncgaaggtcttcngccg

SEQ ID NO: 1644 - RNA, 23 nt, synthetic construct
  source 1..23: mol_type = other RNA
  modified_base 8: mod_base = OTHER; note = A nucleoside-replacement group characterized by the lack of a nucleotide base
  modified_base 16: mod_base = OTHER; note = A nucleoside-replacement group characterized by the lack of a nucleotide base
ctttctcncgaaggtnttctgcc

SEQ ID NO: 1645 - RNA, 23 nt, synthetic construct
  source 1..23: mol_type = other RNA
  modified_base 8: mod_base = OTHER; note = A nucleoside-replacement group characterized by the lack of a nucleotide base
  modified_base 16: mod_base = OTHER; note = A nucleoside-replacement group characterized by the lack of a nucleotide base
gcacacangctcacanagagagc

SEQ ID NO: 1646 - RNA, 23 nt, synthetic construct
  source 1..23: mol_type = other RNA
  modified_base 8: mod_base = OTHER; note = A nucleoside-replacement group characterized by the lack of a nucleotide base
  modified_base 16: mod_base = OTHER; note = A nucleoside-replacement group characterized by the lack of a nucleotide base
gcacacangctcacanagagagc

SEQ ID NO: 1647 - RNA, 23 nt, synthetic construct
  source 1..23: mol_type = other RNA
  modified_base 8: mod_base = OTHER; note = A nucleoside-replacement group characterized by the lack of a nucleotide base
  modified_base 16: mod_base = OTHER; note = A nucleoside-replacement group characterized by the lack of a nucleotide base
tctctcgnacacacgnacacatg

SEQ ID NO: 1648 - RNA, 23 nt, synthetic construct
  source 1..23: mol_type = other RNA
  modified_base 8: mod_base = OTHER; note = A nucleoside-replacement group characterized by the lack of a nucleotide base
  modified_base 16: mod_base = OTHER; note = A nucleoside-replacement group characterized by the lack of a nucleotide base
tctctcgnacacacgnacacatg

SEQ ID NO: 1649 - RNA, 23 nt, synthetic construct
  source 1..23: mol_type = other RNA
  modified_base 8: mod_base = OTHER; note = A nucleoside-replacement group characterized by the lack of a nucleotide base
  modified_base 17: mod_base = OTHER; note = A nucleoside-replacement group characterized by the lack of a nucleotide base
gtcttctnccgagtcntgcaata

SEQ ID NO: 1650 - RNA, 25 nt, synthetic construct
  source 1..25: mol_type = other RNA
ctctctcgcacacacgcacacatgc

SEQ ID NO: 1651 - RNA, 23 nt, synthetic construct
  source 1..23: mol_type = other RNA
tctctcgcacacacgcacacatg

SEQ ID NO: 1652 - RNA, 21 nt, synthetic construct
  source 1..21: mol_type = other RNA
tttctctcgaaggtcttctgc

SEQ ID NO: 1653 - RNA, 23 nt, synthetic construct
  source 1..23: mol_type = other RNA
aaaatccaattaagagagagtga

SEQ ID NO: 1654 - RNA, 23 nt, synthetic construct
  source 1..23: mol_type = other RNA
aaatccaattaagagagagtgat

SEQ ID NO: 1655 - RNA, 23 nt, synthetic construct
  source 1..23: mol_type = other RNA
taaaaatccaattaagagagagt

SEQ ID NO: 1656 - RNA, 23 nt, synthetic construct
  source 1..23: mol_type = other RNA
tttaaaaatccaattaagagaga

SEQ ID NO: 1657 - RNA, 23 nt, synthetic construct
  source 1..23: mol_type = other RNA
ttaaaaatccaattaagagagag

SEQ ID NO: 1658 - RNA, 21 nt, synthetic construct
  source 1..21: mol_type = other RNA
taaaaatccaattaagagaga

SEQ ID NO: 1659 - RNA, 25 nt, synthetic construct
  source 1..25: mol_type = other RNA
cctttctctcgaaggtcttctgccg

SEQ ID NO: 1660 - RNA, 23 nt, synthetic construct
  source 1..23: mol_type = other RNA
gcacacatgctcacacagagagc

SEQ ID NO: 1661 - RNA, 23 nt, synthetic construct
  source 1..23: mol_type = other RNA
gcacacatgctcacacagagagc

SEQ ID NO: 1662 - RNA, 25 nt, synthetic construct
  source 1..25: mol_type = other RNA
gagtcctgcaatatgaatataattt

SEQ ID NO: 1663 - RNA, 25 nt, synthetic construct
  source 1..25: mol_type = other RNA
gagtcctgcaatatgaatataattt

SEQ ID NO: 1664 - RNA, 25 nt, synthetic construct
  source 1..25: mol_type = other RNA
  modified_base 8: mod_base = OTHER; note = A nucleoside-replacement group characterized by the lack of a nucleotide base
  modified_base 11: mod_base = OTHER; note = A nucleoside-replacement group characterized by the lack of a nucleotide base
  modified_base 19: mod_base = OTHER; note = A nucleoside-replacement group characterized by the lack of a nucleotide base
gcacacangcncacacagngagcca

SEQ ID NO: 1665 - RNA, 19 nt, synthetic construct
  source 1..19: mol_type = other RNA
gctcaagcatggattctaa

SEQ ID NO: 1666 - RNA, 19 nt, synthetic construct
  source 1..19: mol_type = other RNA
caatcaaggtagtaatatg

SEQ ID NO: 1667 - RNA, 19 nt, synthetic construct
  source 1..19: mol_type = other RNA
gggcttcgctacaggaatc

SEQ ID NO: 1668 - RNA, 19 nt, synthetic construct
  source 1..19: mol_type = other RNA
cagggtggatttggtaata

SEQ ID NO: 1669 - RNA, 20 nt, synthetic construct
  source 1..20: mol_type = other RNA
  misc_feature 1..20: note = Phosphorothioate linkage
  misc_feature 1..5: note = RNA
  modified_base 1..5: mod_base = OTHER; note = 2'-O-(2-methoxyethyl) ribonucleotide
  modified_base 5: mod_base = OTHER; note = 5-methyl cytosine
  misc_feature 6..15: note = DNA
  modified_base 8: mod_base = OTHER; note = 5-methyl cytosine
  misc_feature 16..20: note = RNA
  modified_base 16..20: mod_base = OTHER; note = 2'-O-(2-methoxyethyl) ribonucleotide
  modified_base 17: mod_base = OTHER; note = 5-methyl cytosine
aaggcttcatattgtacttt

SEQ ID NO: 1670 - DNA, 24 bp, synthetic construct
  source 1..24: mol_type = other DNA
ctcagtgccttattcagtcttctc

SEQ ID NO: 1671 - DNA, 20 bp, synthetic construct
  source 1..20: mol_type = other DNA
tcttctgccgagtcccattt

SEQ ID NO: 1672 - DNA, 24 bp, synthetic construct
  source 1..24: mol_type = other DNA
tcagcgtctgcacatccctacaat

SEQ ID NO: 1673 - DNA, 21 bp, synthetic construct
  source 1..21: mol_type = other DNA
ccacgaactttagcttctcca

SEQ ID NO: 1674 - DNA, 20 bp, synthetic construct
  source 1..20: mol_type = other DNA
gccaattgtttcagcacctg

SEQ ID NO: 1675 - DNA, 26 bp, synthetic construct
  source 1..26: mol_type = other DNA
actttcttctttcctctgcagcctcc

SEQ ID NO: 1676 - DNA, 25 bp, synthetic construct
  source 1..25: mol_type = other DNA
cgccagccttggggccgtgactcac

SEQ ID NO: 1677 - DNA, 25 bp, synthetic construct
  source 1..25: mol_type = other DNA
ccgccagccttggggccgtgactca

SEQ ID NO: 1678 - DNA, 25 bp, synthetic construct
  source 1..25: mol_type = other DNA
accgccagccttggggccgtgactc

SEQ ID NO: 1679 - DNA, 25 bp, synthetic construct
  source 1..25: mol_type = other DNA
caccgccagccttggggccgtgact

SEQ ID NO: 1680 - DNA, 25 bp, synthetic construct
  source 1..25: mol_type = other DNA
ccaccgccagccttggggccgtgac

SEQ ID NO: 1681 - DNA, 25 bp, synthetic construct
  source 1..25: mol_type = other DNA
cccaccgccagccttggggccgtga

SEQ ID NO: 1682 - DNA, 25 bp, synthetic construct
  source 1..25: mol_type = other DNA
gcccaccgccagccttggggccgtg

SEQ ID NO: 1683 - DNA, 25 bp, synthetic construct
  source 1..25: mol_type = other DNA
cgcccaccgccagccttggggccgt

SEQ ID NO: 1684 - DNA, 25 bp, synthetic construct
  source 1..25: mol_type = other DNA
gcgcccaccgccagccttggggccg

SEQ ID NO: 1685 - DNA, 25 bp, synthetic construct
  source 1..25: mol_type = other DNA
ggcgcccaccgccagccttggggcc

SEQ ID NO: 1686 - DNA, 25 bp, synthetic construct
  source 1..25: mol_type = other DNA
gggcgcccaccgccagccttggggc

SEQ ID NO: 1687 - DNA, 25 bp, synthetic construct
  source 1..25: mol_type = other DNA
ggggcgcccaccgccagccttgggg

SEQ ID NO: 1688 - DNA, 25 bp, synthetic construct
  source 1..25: mol_type = other DNA
gggggcgcccaccgccagccttggg

SEQ ID NO: 1689 - DNA, 25 bp, synthetic construct
  source 1..25: mol_type = other DNA
tgggggcgcccaccgccagccttgg

SEQ ID NO: 1690 - DNA, 25 bp, synthetic construct
  source 1..25: mol_type = other DNA
ctgggggcgcccaccgccagccttg

SEQ ID NO: 1691 - DNA, 25 bp, synthetic construct
  source 1..25: mol_type = other DNA
gctgggggcgcccaccgccagcctt

SEQ ID NO: 1692 - DNA, 25 bp, synthetic construct
  source 1..25: mol_type = other DNA
ggctgggggcgcccaccgccagcct

SEQ ID NO: 1693 - DNA, 25 bp, synthetic construct
  source 1..25: mol_type = other DNA
tggctgggggcgcccaccgccagcc

SEQ ID NO: 1694 - DNA, 25 bp, synthetic construct
  source 1..25: mol_type = other DNA
ctggctgggggcgcccaccgccagc

SEQ ID NO: 1695 - DNA, 25 bp, synthetic construct
  source 1..25: mol_type = other DNA
gctggctgggggcgcccaccgccag

SEQ ID NO: 1696 - DNA, 25 bp, synthetic construct
  source 1..25: mol_type = other DNA
cgctggctgggggcgcccaccgcca

SEQ ID NO: 1697 - DNA, 25 bp, synthetic construct
  source 1..25: mol_type = other DNA
tcgctggctgggggcgcccaccgcc

SEQ ID NO: 1698 - DNA, 25 bp, synthetic construct
  source 1..25: mol_type = other DNA
ctcgctggctgggggcgcccaccgc

SEQ ID NO: 1699 - DNA, 25 bp, synthetic construct
  source 1..25: mol_type = other DNA
tctcgctggctgggggcgcccaccg

SEQ ID NO: 1700 - DNA, 25 bp, synthetic construct
  source 1..25: mol_type = other DNA
ctctcgctggctgggggcgcccacc

SEQ ID NO: 1701 - DNA, 25 bp, synthetic construct
  source 1..25: mol_type = other DNA
actctcgctggctgggggcgcccac

SEQ ID NO: 1702 - DNA, 25 bp, synthetic construct
  source 1..25: mol_type = other DNA
gactctcgctggctgggggcgccca

SEQ ID NO: 1703 - DNA, 25 bp, synthetic construct
  source 1..25: mol_type = other DNA
ggactctcgctggctgggggcgccc

SEQ ID NO: 1704 - DNA, 25 bp, synthetic construct
  source 1..25: mol_type = other DNA
aggactctcgctggctgggggcgcc

SEQ ID NO: 1705 - DNA, 25 bp, synthetic construct
  source 1..25: mol_type = other DNA
caggactctcgctggctgggggcgc

SEQ ID NO: 1706 - DNA, 25 bp, synthetic construct
  source 1..25: mol_type = other DNA
ccaggactctcgctggctgggggcg

SEQ ID NO: 1707 - DNA, 25 bp, synthetic construct
  source 1..25: mol_type = other DNA
gccaggactctcgctggctgggggc

SEQ ID NO: 1708 - DNA, 25 bp, synthetic construct
  source 1..25: mol_type = other DNA
ggccaggactctcgctggctggggg

SEQ ID NO: 1709 - DNA, 25 bp, synthetic construct
  source 1..25: mol_type = other DNA
gggccaggactctcgctggctgggg

SEQ ID NO: 1710 - DNA, 25 bp, synthetic construct
  source 1..25: mol_type = other DNA
tgggccaggactctcgctggctggg

SEQ ID NO: 1711 - DNA, 25 bp, synthetic construct
  source 1..25: mol_type = other DNA
ctgggccaggactctcgctggctgg

SEQ ID NO: 1712 - DNA, 25 bp, synthetic construct
  source 1..25: mol_type = other DNA
tctgggccaggactctcgctggctg

SEQ ID NO: 1713 - DNA, 25 bp, synthetic construct
  source 1..25: mol_type = other DNA
gtctgggccaggactctcgctggct

SEQ ID NO: 1714 - DNA, 25 bp, synthetic construct
  source 1..25: mol_type = other DNA
ggtctgggccaggactctcgctggc

SEQ ID NO: 1715 - DNA, 25 bp, synthetic construct
  source 1..25: mol_type = other DNA
cggtctgggccaggactctcgctgg

SEQ ID NO: 1716 - DNA, 25 bp, synthetic construct
  source 1..25: mol_type = other DNA
ccggtctgggccaggactctcgctg

SEQ ID NO: 1717 - DNA, 25 bp, synthetic construct
  source 1..25: mol_type = other DNA
cccggtctgggccaggactctcgct

SEQ ID NO: 1718 - DNA, 25 bp, synthetic construct
  source 1..25: mol_type = other DNA
gcccggtctgggccaggactctcgc

SEQ ID NO: 1719 - DNA, 25 bp, synthetic construct
  source 1..25: mol_type = other DNA
ggcccggtctgggccaggactctcg

SEQ ID NO: 1720 - DNA, 25 bp, synthetic construct
  source 1..25: mol_type = other DNA
gggcccggtctgggccaggactctc

SEQ ID NO: 1721 - DNA, 25 bp, synthetic construct
  source 1..25: mol_type = other DNA
ggggcccggtctgggccaggactct

SEQ ID NO: 1722 - DNA, 25 bp, synthetic construct
  source 1..25: mol_type = other DNA
tggggcccggtctgggccaggactc

SEQ ID NO: 1723 - DNA, 25 bp, synthetic construct
  source 1..25: mol_type = other DNA
gtggggcccggtctgggccaggact

SEQ ID NO: 1724 - DNA, 25 bp, synthetic construct
  source 1..25: mol_type = other DNA
ggtggggcccggtctgggccaggac

SEQ ID NO: 1725 - DNA, 25 bp, synthetic construct
  source 1..25: mol_type = other DNA
gggtggggcccggtctgggccagga

SEQ ID NO: 1726 - DNA, 25 bp, synthetic construct
  source 1..25: mol_type = other DNA
ggggtggggcccggtctgggccagg

SEQ ID NO: 1727 - DNA, 25 bp, synthetic construct
  source 1..25: mol_type = other DNA
aggggtggggcccggtctgggccag

SEQ ID NO: 1728 - DNA, 25 bp, synthetic construct
  source 1..25: mol_type = other DNA
caggggtggggcccggtctgggcca

SEQ ID NO: 1729 - DNA, 25 bp, synthetic construct
  source 1..25: mol_type = other DNA
gcaggggtggggcccggtctgggcc

SEQ ID NO: 1730 - DNA, 25 bp, synthetic construct
  source 1..25: mol_type = other DNA
ggcaggggtggggcccggtctgggc

SEQ ID NO: 1731 - DNA, 25 bp, synthetic construct
  source 1..25: mol_type = other DNA
aggcaggggtggggcccggtctggg

SEQ ID NO: 1732 - DNA, 25 bp, synthetic construct
  source 1..25: mol_type = other DNA
caggcaggggtggggcccggtctgg

SEQ ID NO: 1733 - DNA, 25 bp, synthetic construct
  source 1..25: mol_type = other DNA
ccaggcaggggtggggcccggtctg

SEQ ID NO: 1734 - DNA, 25 bp, synthetic construct
  source 1..25: mol_type = other DNA
cccaggcaggggtggggcccggtct

SEQ ID NO: 1735 - DNA, 25 bp, synthetic construct
  source 1..25: mol_type = other DNA
ccccaggcaggggtggggcccggtc

SEQ ID NO: 1736 - DNA, 25 bp, synthetic construct
  source 1..25: mol_type = other DNA
accccaggcaggggtggggcccggt

SEQ ID NO: 1737 - DNA, 25 bp, synthetic construct
  source 1..25: mol_type = other DNA
aaccccaggcaggggtggggcccgg

SEQ ID NO: 1738 - DNA, 25 bp, synthetic construct
  source 1..25: mol_type = other DNA
aaaccccaggcaggggtggggcccg

SEQ ID NO: 1739 - DNA, 25 bp, synthetic construct
  source 1..25: mol_type = other DNA
caaaccccaggcaggggtggggccc

SEQ ID NO: 1740 - DNA, 25 bp, synthetic construct
  source 1..25: mol_type = other DNA
gcaaaccccaggcaggggtggggcc

SEQ ID NO: 1741 - DNA, 25 bp, synthetic construct
  source 1..25: mol_type = other DNA
agcaaaccccaggcaggggtggggc

SEQ ID NO: 1742 - DNA, 25 bp, synthetic construct
  source 1..25: mol_type = other DNA
aagcaaaccccaggcaggggtgggg

SEQ ID NO: 1743 - DNA, 25 bp, synthetic construct
  source 1..25: mol_type = other DNA
gaagcaaaccccaggcaggggtggg

SEQ ID NO: 1744 - DNA, 25 bp, synthetic construct
  source 1..25: mol_type = other DNA
tgaagcaaaccccaggcaggggtgg

SEQ ID NO: 1745 - DNA, 25 bp, synthetic construct
  source 1..25: mol_type = other DNA
ttgaagcaaaccccaggcaggggtg

SEQ ID NO: 1746 - DNA, 25 bp, synthetic construct
  source 1..25: mol_type = other DNA
cttgaagcaaaccccaggcaggggt

SEQ ID NO: 1747 - DNA, 25 bp, synthetic construct
  source 1..25: mol_type = other DNA
tcttgaagcaaaccccaggcagggg

SEQ ID NO: 1748 - DNA, 25 bp, synthetic construct
  source 1..25: mol_type = other DNA
ctcttgaagcaaaccccaggcaggg

SEQ ID NO: 1749 - DNA, 25 bp, synthetic construct
  source 1..25: mol_type = other DNA
gctcttgaagcaaaccccaggcagg

SEQ ID NO: 1750 - DNA, 25 bp, synthetic construct
  source 1..25: mol_type = other DNA
ggctcttgaagcaaaccccaggcag

SEQ ID NO: 1751 - DNA, 25 bp, synthetic construct
  source 1..25: mol_type = other DNA
gggctcttgaagcaaaccccaggca

SEQ ID NO: 1752 - DNA, 25 bp, synthetic construct
  source 1..25: mol_type = other DNA
agggctcttgaagcaaaccccaggc

SEQ ID NO: 1753 - DNA, 25 bp, synthetic construct
  source 1..25: mol_type = other DNA
cagggctcttgaagcaaaccccagg

SEQ ID NO: 1754 - DNA, 25 bp, synthetic construct
  source 1..25: mol_type = other DNA
ccagggctcttgaagcaaaccccag

SEQ ID NO: 1755 - DNA, 25 bp, synthetic construct
  source 1..25: mol_type = other DNA
cccagggctcttgaagcaaacccca

SEQ ID NO: 1756 - DNA, 25 bp, synthetic construct
  source 1..25: mol_type = other DNA
acccagggctcttgaagcaaacccc

SEQ ID NO: 1757 - DNA, 25 bp, synthetic construct
  source 1..25: mol_type = other DNA
cacccagggctcttgaagcaaaccc

SEQ ID NO: 1758 - DNA, 25 bp, synthetic construct
  source 1..25: mol_type = other DNA
ccacccagggctcttgaagcaaacc

SEQ ID NO: 1759 - DNA, 25 bp, synthetic construct
  source 1..25: mol_type = other DNA
tccacccagggctcttgaagcaaac

SEQ ID NO: 1760 - DNA, 25 bp, synthetic construct
  source 1..25: mol_type = other DNA
ctccacccagggctcttgaagcaaa

SEQ ID NO: 1761 - DNA, 25 bp, synthetic construct
  source 1..25: mol_type = other DNA
cctccacccagggctcttgaagcaa

SEQ ID NO: 1762 - DNA, 25 bp, synthetic construct
  source 1..25: mol_type = other DNA
ccctccacccagggctcttgaagca

SEQ ID NO: 1763 - DNA, 25 bp, synthetic construct
  source 1..25: mol_type = other DNA
tccctccacccagggctcttgaagc

SEQ ID NO: 1764 - DNA, 25 bp, synthetic construct
  source 1..25: mol_type = other DNA
atccctccacccagggctcttgaag

SEQ ID NO: 1765 - DNA, 25 bp, synthetic construct
  source 1..25: mol_type = other DNA
catccctccacccagggctcttgaa

SEQ ID NO: 1766 - DNA, 25 bp, synthetic construct
  source 1..25: mol_type = other DNA
ccatccctccacccagggctcttga

SEQ ID NO: 1767 - DNA, 25 bp, synthetic construct
  source 1..25: mol_type = other DNA
tccatccctccacccagggctcttg

SEQ ID NO: 1768 - DNA, 25 bp, synthetic construct
  source 1..25: mol_type = other DNA
ctccatccctccacccagggctctt

SEQ ID NO: 1769 - DNA, 25 bp, synthetic construct
  source 1..25: mol_type = other DNA
actccatccctccacccagggctct

SEQ ID NO: 1770 - DNA, 25 bp, synthetic construct
  source 1..25: mol_type = other DNA
gactccatccctccacccagggctc

SEQ ID NO: 1771 - DNA, 25 bp, synthetic construct
  source 1..25: mol_type = other DNA
tgactccatccctccacccagggct

SEQ ID NO: 1772 - DNA, 25 bp, synthetic construct
  source 1..25: mol_type = other DNA
ctgactccatccctccacccagggc

SEQ ID NO: 1773 - DNA, 25 bp, synthetic construct
  source 1..25: mol_type = other DNA
actgactccatccctccacccaggg

SEQ ID NO: 1774 - DNA, 25 bp, synthetic construct
  source 1..25: mol_type = other DNA
cactgactccatccctccacccagg

SEQ ID NO: 1775 - DNA, 25 bp, synthetic construct
  source 1..25: mol_type = other DNA
ccactgactccatccctccacccag

SEQ ID NO: 1776 - DNA, 25 bp, synthetic construct
  source 1..25: mol_type = other DNA
accactgactccatccctccaccca

SEQ ID NO: 1777 - DNA, 25 bp, synthetic construct
  source 1..25: mol_type = other DNA
caccactgactccatccctccaccc

SEQ ID NO: 1778 - DNA, 25 bp, synthetic construct
  source 1..25: mol_type = other DNA
ccaccactgactccatccctccacc

SEQ ID NO: 1779 - DNA, 25 bp, synthetic construct
  source 1..25: mol_type = other DNA
gccaccactgactccatccctccac

SEQ ID NO: 1780 - DNA, 25 bp, synthetic construct
  source 1..25: mol_type = other DNA
agccaccactgactccatccctcca

SEQ ID NO: 1781 - DNA, 25 bp, synthetic construct
  source 1..25: mol_type = other DNA
gagccaccactgactccatccctcc

SEQ ID NO: 1782 - DNA, 25 bp, synthetic construct
  source 1..25: mol_type = other DNA
agagccaccactgactccatccctc

SEQ ID NO: 1783 - DNA, 25 bp, synthetic construct
  source 1..25: mol_type = other DNA
cagagccaccactgactccatccct

SEQ ID NO: 1784 - DNA, 25 bp, synthetic construct
  source 1..25: mol_type = other DNA
ccagagccaccactgactccatccc

SEQ ID NO: 1785 - DNA, 25 bp, synthetic construct
  source 1..25: mol_type = other DNA
gccagagccaccactgactccatcc

SEQ ID NO: 1786 - DNA, 25 bp, synthetic construct
  source 1..25: mol_type = other DNA
agccagagccaccactgactccatc

SEQ ID NO: 1787 - DNA, 25 bp, synthetic construct
  source 1..25: mol_type = other DNA
cagccagagccaccactgactccat

SEQ ID NO: 1788 - DNA, 25 bp, synthetic construct
  source 1..25: mol_type = other DNA
ccagccagagccaccactgactcca

SEQ ID NO: 1789 - DNA, 25 bp, synthetic construct
  source 1..25: mol_type = other DNA
tccagccagagccaccactgactcc

SEQ ID NO: 1790 - DNA, 25 bp, synthetic construct
  source 1..25: mol_type = other DNA
ctccagccagagccaccactgactc

SEQ ID NO: 1791 - DNA, 25 bp, synthetic construct
  source 1..25: mol_type = other DNA
gctccagccagagccaccactgact

SEQ ID NO: 1792 - DNA, 25 bp, synthetic construct
  source 1..25: mol_type = other DNA
ggctccagccagagccaccactgac

SEQ ID NO: 1793 - DNA, 25 bp, synthetic construct
  source 1..25: mol_type = other DNA
gggctccagccagagccaccactga

SEQ ID NO: 1794 - DNA, 25 bp, synthetic construct
  source 1..25: mol_type = other DNA
tgggctccagccagagccaccactg

SEQ ID NO: 1795 - DNA, 25 bp, synthetic construct
  source 1..25: mol_type = other DNA
atgggctccagccagagccaccact

SEQ ID NO: 1796 - DNA, 25 bp, synthetic construct
  source 1..25: mol_type = other DNA
gatgggctccagccagagccaccac

SEQ ID NO: 1797 - DNA, 25 bp, synthetic construct
  source 1..25: mol_type = other DNA
tgatgggctccagccagagccacca

SEQ ID NO: 1798 - DNA, 25 bp, synthetic construct
  source 1..25: mol_type = other DNA
ctgatgggctccagccagagccacc

SEQ ID NO: 1799 - DNA, 25 bp, synthetic construct
  source 1..25: mol_type = other DNA
cctgatgggctccagccagagccac

SEQ ID NO: 1800 - DNA, 25 bp, synthetic construct
  source 1..25: mol_type = other DNA
acctgatgggctccagccagagcca

SEQ ID NO: 1801 - DNA, 25 bp, synthetic construct
  source 1..25: mol_type = other DNA
cacctgatgggctccagccagagcc

SEQ ID NO: 1802 - DNA, 25 bp, synthetic construct
  source 1..25: mol_type = other DNA
acacctgatgggctccagccagagc

SEQ ID NO: 1803 - DNA, 25 bp, synthetic construct
  source 1..25: mol_type = other DNA
cacacctgatgggctccagccagag

SEQ ID NO: 1804 - DNA, 25 bp, synthetic construct
  source 1..25: mol_type = other DNA
tcacacctgatgggctccagccaga

SEQ ID NO: 1805 - DNA, 25 bp, synthetic construct
  source 1..25: mol_type = other DNA
ttcacacctgatgggctccagccag

SEQ ID NO: 1806 - DNA, 25 bp, synthetic construct
  source 1..25: mol_type = other DNA
gttcacacctgatgggctccagcca

SEQ ID NO: 1807 - DNA, 25 bp, synthetic construct
  source 1..25: mol_type = other DNA
cgttcacacctgatgggctccagcc

SEQ ID NO: 1808 - DNA, 25 bp, synthetic construct
  source 1..25: mol_type = other DNA
tcgttcacacctgatgggctccagc

SEQ ID NO: 1809 - DNA, 25 bp, synthetic construct
  source 1..25: mol_type = other DNA
ctcgttcacacctgatgggctccag

SEQ ID NO: 1810 - DNA, 25 bp, synthetic construct
  source 1..25: mol_type = other DNA
gctcgttcacacctgatgggctcca

SEQ ID NO: 1811 - DNA, 25 bp, synthetic construct
  source 1..25: mol_type = other DNA
ggctcgttcacacctgatgggctcc

SEQ ID NO: 1812 - DNA, 25 bp, synthetic construct
  source 1..25: mol_type = other DNA
aggctcgttcacacctgatgggctc

SEQ ID NO: 1813 - DNA, 25 bp, synthetic construct
  source 1..25: mol_type = other DNA
gaggctcgttcacacctgatgggct

SEQ ID NO: 1814 - DNA, 25 bp, synthetic construct
  source 1..25: mol_type = other DNA
ggaggctcgttcacacctgatgggc

SEQ ID NO: 1815 - DNA, 25 bp, synthetic construct
  source 1..25: mol_type = other DNA
gggaggctcgttcacacctgatggg

SEQ ID NO: 1816 - DNA, 25 bp, synthetic construct
  source 1..25: mol_type = other DNA
agggaggctcgttcacacctgatgg

SEQ ID NO: 1817 - DNA, 25 bp, synthetic construct
  source 1..25: mol_type = other DNA
gagggaggctcgttcacacctgatg

SEQ ID NO: 1818 - DNA, 25 bp, synthetic construct
  source 1..25: mol_type = other DNA
ggagggaggctcgttcacacctgat

SEQ ID NO: 1819 - DNA, 25 bp, synthetic construct
  source 1..25: mol_type = other DNA
gggagggaggctcgttcacacctga

SEQ ID NO: 1820 - DNA, 25 bp, synthetic construct
  source 1..25: mol_type = other DNA
ggggagggaggctcgttcacacctg

SEQ ID NO: 1821 - DNA, 25 bp, synthetic construct
  source 1..25: mol_type = other DNA
aggggagggaggctcgttcacacct

SEQ ID NO: 1822 - DNA, 25 bp, synthetic construct
  source 1..25: mol_type = other DNA
aaggggagggaggctcgttcacacc

SEQ ID NO: 1823 - DNA, 25 bp, synthetic construct
  source 1..25: mol_type = other DNA
aaaggggagggaggctcgttcacac

SEQ ID NO: 1824 - DNA, 25 bp, synthetic construct
  source 1..25: mol_type = other DNA
gaaaggggagggaggctcgttcaca

SEQ ID NO: 1825 - DNA, 25 bp, synthetic construct
  source 1..25: mol_type = other DNA
agaaaggggagggaggctcgttcac

SEQ ID NO: 1826 - DNA, 25 bp, synthetic construct
  source 1..25: mol_type = other DNA
aagaaaggggagggaggctcgttca

SEQ ID NO: 1827 - DNA, 25 bp, synthetic construct
  source 1..25: mol_type = other DNA
gaagaaaggggagggaggctcgttc

SEQ ID NO: 1828 - DNA, 25 bp, synthetic construct
  source 1..25: mol_type = other DNA
agaagaaaggggagggaggctcgtt

SEQ ID NO: 1829 - DNA, 25 bp, synthetic construct
  source 1..25: mol_type = other DNA
gagaagaaaggggagggaggctcgt

SEQ ID NO: 1830 - DNA, 25 bp, synthetic construct
  source 1..25: mol_type = other DNA
cgagaagaaaggggagggaggctcg

SEQ ID NO: 1831 - DNA, 25 bp, synthetic construct
  source 1..25: mol_type = other DNA
ccgagaagaaaggggagggaggctc

SEQ ID NO: 1832 - DNA, 25 bp, synthetic construct
  source 1..25: mol_type = other DNA
accgagaagaaaggggagggaggct

SEQ ID NO: 1833 - DNA, 25 bp, synthetic construct
  source 1..25: mol_type = other DNA
caccgagaagaaaggggagggaggc

SEQ ID NO: 1834 - DNA, 25 bp, synthetic construct
  source 1..25: mol_type = other DNA
gcaccgagaagaaaggggagggagg

SEQ ID NO: 1835 - DNA, 25 bp, synthetic construct
  source 1..25: mol_type = other DNA
agcaccgagaagaaaggggagggag

SEQ ID NO: 1836 - DNA, 25 bp, synthetic construct
  source 1..25: mol_type = other DNA
aagcaccgagaagaaaggggaggga

SEQ ID NO: 1837 - DNA, 25 bp, synthetic construct
  source 1..25: mol_type = other DNA
gaagcaccgagaagaaaggggaggg

SEQ ID NO: 1838 - DNA, 25 bp, synthetic construct
  source 1..25: mol_type = other DNA
agaagcaccgagaagaaaggggagg

SEQ ID NO: 1839 - DNA, 25 bp, synthetic construct
  source 1..25: mol_type = other DNA
aagaagcaccgagaagaaaggggag

SEQ ID NO: 1840 - DNA, 25 bp, synthetic construct
  source 1..25: mol_type = other DNA
gaagaagcaccgagaagaaagggga

SEQ ID NO: 1841 - DNA, 25 bp, synthetic construct
  source 1..25: mol_type = other DNA
agaagaagcaccgagaagaaagggg

SEQ ID NO: 1842 - DNA, 25 bp, synthetic construct
  source 1..25: mol_type = other DNA
gagaagaagcaccgagaagaaaggg

SEQ ID NO: 1843 - DNA, 25 bp, synthetic construct
  source 1..25: mol_type = other DNA
cgagaagaagcaccgagaagaaagg

SEQ ID NO: 1844 - DNA, 25 bp, synthetic construct
  source 1..25: mol_type = other DNA
acgagaagaagcaccgagaagaaag

SEQ ID NO: 1845 - DNA, 25 bp, synthetic construct
  source 1..25: mol_type = other DNA
cacgagaagaagcaccgagaagaaa

SEQ ID NO: 1846 - DNA, 25 bp, synthetic construct
  source 1..25: mol_type = other DNA
tcacgagaagaagcaccgagaagaa

SEQ ID NO: 1847 - DNA, 25 bp, synthetic construct
  source 1..25: mol_type = other DNA
gtcacgagaagaagcaccgagaaga

SEQ ID NO: 1848 - DNA, 25 bp, synthetic construct
  source 1..25: mol_type = other DNA
agtcacgagaagaagcaccgagaag

SEQ ID NO: 1849 - DNA, 25 bp, synthetic construct
  source 1..25: mol_type = other DNA
aagtcacgagaagaagcaccgagaa

SEQ ID NO: 1850 - DNA, 25 bp, synthetic construct
  source 1..25: mol_type = other DNA
caagtcacgagaagaagcaccgaga

SEQ ID NO: 1851 - DNA, 25 bp, synthetic construct
  source 1..25: mol_type = other DNA
ccaagtcacgagaagaagcaccgag

SEQ ID NO: 1852 - DNA, 25 bp, Homo sapiens
  source 1..25: mol_type = genomic DNA
gtgagtcacggccccaaggctggcg

SEQ ID NO: 1853 - DNA, 25 bp, Homo sapiens
  source 1..25: mol_type = genomic DNA
tgagtcacggccccaaggctggcgg

SEQ ID NO: 1854 - DNA, 25 bp, Homo sapiens
  source 1..25: mol_type = genomic DNA
gagtcacggccccaaggctggcggt

SEQ ID NO: 1855 - DNA, 25 bp, Homo sapiens
  source 1..25: mol_type = genomic DNA
agtcacggccccaaggctggcggtg

SEQ ID NO: 1856 - DNA, 25 bp, Homo sapiens
  source 1..25: mol_type = genomic DNA
gtcacggccccaaggctggcggtgg

SEQ ID NO: 1857 - DNA, 25 bp, Homo sapiens
  source 1..25: mol_type = genomic DNA
tcacggccccaaggctggcggtggg

SEQ ID NO: 1858 - DNA, 25 bp, Homo sapiens
  source 1..25: mol_type = genomic DNA
cacggccccaaggctggcggtgggc

SEQ ID NO: 1859 - DNA, 25 bp, Homo sapiens
  source 1..25: mol_type = genomic DNA
acggccccaaggctggcggtgggcg

SEQ ID NO: 1860 - DNA, 25 bp, Homo sapiens
  source 1..25: mol_type = genomic DNA
cggccccaaggctggcggtgggcgc

SEQ ID NO: 1861 - DNA, 25 bp, Homo sapiens
  source 1..25: mol_type = genomic DNA
ggccccaaggctggcggtgggcgcc

SEQ ID NO: 1862 - DNA, 25 bp, Homo sapiens
  source 1..25: mol_type = genomic DNA
gccccaaggctggcggtgggcgccc

SEQ ID NO: 1863 - DNA, 25 bp, Homo sapiens
  source 1..25: mol_type = genomic DNA
ccccaaggctggcggtgggcgcccc

SEQ ID NO: 1864 - DNA, 25 bp, Homo sapiens
  source 1..25: mol_type = genomic DNA
cccaaggctggcggtgggcgccccc

SEQ ID NO: 1865 - DNA, 25 bp, Homo sapiens
  source 1..25: mol_type = genomic DNA
ccaaggctggcggtgggcgccccca

SEQ ID NO: 1866 - DNA, 25 bp, Homo sapiens
  source 1..25: mol_type = genomic DNA
caaggctggcggtgggcgcccccag

SEQ ID NO: 1867 - DNA, 25 bp, Homo sapiens
  source 1..25: mol_type = genomic DNA
aaggctggcggtgggcgcccccagc

SEQ ID NO: 1868 - DNA, 25 bp, Homo sapiens
  source 1..25: mol_type = genomic DNA
aggctggcggtgggcgcccccagcc

SEQ ID NO: 1869 - DNA, 25 bp, Homo sapiens
  source 1..25: mol_type = genomic DNA
ggctggcggtgggcgcccccagcca

SEQ ID NO: 1870 - DNA, 25 bp, Homo sapiens
  source 1..25: mol_type = genomic DNA
gctggcggtgggcgcccccagccag

SEQ ID NO: 1871 - DNA, 25 bp, Homo sapiens
  source 1..25: mol_type = genomic DNA
ctggcggtgggcgcccccagccagc

SEQ ID NO: 1872 - DNA, 25 bp, Homo sapiens
  source 1..25: mol_type = genomic DNA
tggcggtgggcgcccccagccagcg

SEQ ID NO: 1873 - DNA, 25 bp, Homo sapiens
  source 1..25: mol_type = genomic DNA
ggcggtgggcgcccccagccagcga

SEQ ID NO: 1874 - DNA, 25 bp, Homo sapiens
  source 1..25: mol_type = genomic DNA
gcggtgggcgcccccagccagcgag

SEQ ID NO: 1875 - DNA, 25 bp, Homo sapiens
  source 1..25: mol_type = genomic DNA
cggtgggcgcccccagccagcgaga

SEQ ID NO: 1876 - DNA, 25 bp, Homo sapiens
  source 1..25: mol_type = genomic DNA
ggtgggcgcccccagccagcgagag

SEQ ID NO: 1877 - DNA, 25 bp, Homo sapiens
  source 1..25: mol_type = genomic DNA
gtgggcgcccccagccagcgagagt

SEQ ID NO: 1878 - DNA, 25 bp, Homo sapiens
  source 1..25: mol_type = genomic DNA
tgggcgcccccagccagcgagagtc

SEQ ID NO: 1879 - DNA, 25 bp, Homo sapiens
  source 1..25: mol_type = genomic DNA
gggcgcccccagccagcgagagtcc

SEQ ID NO: 1880 - DNA, 25 bp, Homo sapiens
  source 1..25: mol_type = genomic DNA
ggcgcccccagccagcgagagtcct

SEQ ID NO: 1881 - DNA, 25 bp, Homo sapiens
  source 1..25: mol_type = genomic DNA
gcgcccccagccagcgagagtcctg

SEQ ID NO: 1882 - DNA, 25 bp, Homo sapiens
  source 1..25: mol_type = genomic DNA
cgcccccagccagcgagagtcctgg

SEQ ID NO: 1883 - DNA, 25 bp, Homo sapiens
  source 1..25: mol_type = genomic DNA
gcccccagccagcgagagtcctggc

SEQ ID NO: 1884 - DNA, 25 bp, Homo sapiens
  source 1..25: mol_type = genomic DNA
cccccagccagcgagagtcctggcc

SEQ ID NO: 1885 - DNA, 25 bp, Homo sapiens
  source 1..25: mol_type = genomic DNA
ccccagccagcgagagtcctggccc

SEQ ID NO: 1886 - DNA, 25 bp, Homo sapiens
  source 1..25: mol_type = genomic DNA
cccagccagcgagagtcctggccca

SEQ ID NO: 1887 - DNA, 25 bp, Homo sapiens
  source 1..25: mol_type = genomic DNA
ccagccagcgagagtcctggcccag

SEQ ID NO: 1888 - DNA, 25 bp, Homo sapiens
  source 1..25: mol_type = genomic DNA
cagccagcgagagtcctggcccaga

SEQ ID NO: 1889 - DNA, 25 bp, Homo sapiens
  source 1..25: mol_type = genomic DNA
agccagcgagagtcctggcccagac

SEQ ID NO: 1890 - DNA, 25 bp, Homo sapiens
  source 1..25: mol_type = genomic DNA
gccagcgagagtcctggcccagacc

SEQ ID NO: 1891 - DNA, 25 bp, Homo sapiens
  source 1..25: mol_type = genomic DNA
ccagcgagagtcctggcccagaccg

SEQ ID NO: 1892 - DNA, 25 bp, Homo sapiens
  source 1..25: mol_type = genomic DNA
cagcgagagtcctggcccagaccgg

SEQ ID NO: 1893 - DNA, 25 bp, Homo sapiens
  source 1..25: mol_type = genomic DNA
agcgagagtcctggcccagaccggg

SEQ ID NO: 1894 - DNA, 25 bp, Homo sapiens
  source 1..25: mol_type = genomic DNA
gcgagagtcctggcccagaccgggc

SEQ ID NO: 1895 - DNA, 25 bp, Homo sapiens
  source 1..25: mol_type = genomic DNA
cgagagtcctggcccagaccgggcc

SEQ ID NO: 1896 - DNA, 25 bp, Homo sapiens
  source 1..25: mol_type = genomic DNA
gagagtcctggcccagaccgggccc

SEQ ID NO: 1897 - DNA, 25 bp, Homo sapiens
  source 1..25: mol_type = genomic DNA
agagtcctggcccagaccgggcccc

SEQ ID NO: 1898 - DNA, 25 bp, Homo sapiens
  source 1..25: mol_type = genomic DNA
gagtcctggcccagaccgggcccca

SEQ ID NO: 1899 - DNA, 25 bp, Homo sapiens
  source 1..25: mol_type = genomic DNA
agtcctggcccagaccgggccccac

SEQ ID NO: 1900 - DNA, 25 bp, Homo sapiens
  source 1..25: mol_type = genomic DNA
gtcctggcccagaccgggccccacc

SEQ ID NO: 1901 - DNA, 25 bp, Homo sapiens
  source 1..25: mol_type = genomic DNA
tcctggcccagaccgggccccaccc

SEQ ID NO: 1902 - DNA, 25 bp, Homo sapiens
  source 1..25: mol_type = genomic DNA
cctggcccagaccgggccccacccc

SEQ ID NO: 1903 - DNA, 25 bp, Homo sapiens
  source 1..25: mol_type = genomic DNA
ctggcccagaccgggccccacccct

SEQ ID NO: 1904 - DNA, 25 bp, Homo sapiens
  source 1..25: mol_type = genomic DNA
tggcccagaccgggccccacccctg

SEQ ID NO: 1905 - DNA, 25 bp, Homo sapiens
  source 1..25: mol_type = genomic DNA
ggcccagaccgggccccacccctgc

SEQ ID NO: 1906 - DNA, 25 bp, Homo sapiens
  source 1..25: mol_type = genomic DNA
gcccagaccgggccccacccctgcc

SEQ ID NO: 1907 - DNA, 25 bp, Homo sapiens
  source 1..25: mol_type = genomic DNA
cccagaccgggccccacccctgcct

SEQ ID NO: 1908 - DNA, 25 bp, Homo sapiens
  source 1..25: mol_type = genomic DNA
ccagaccgggccccacccctgcctg

SEQ ID NO: 1909 - DNA, 25 bp, Homo sapiens
  source 1..25: mol_type = genomic DNA
cagaccgggccccacccctgcctgg

SEQ ID NO: 1910 - DNA, 25 bp, Homo sapiens
  source 1..25: mol_type = genomic DNA
agaccgggccccacccctgcctggg

SEQ ID NO: 1911 - DNA, 25 bp, Homo sapiens
  source 1..25: mol_type = genomic DNA
gaccgggccccacccctgcctgggg

SEQ ID NO: 1912 - DNA, 25 bp, Homo sapiens
  source 1..25: mol_type = genomic DNA
accgggccccacccctgcctggggt

SEQ ID NO: 1913 - DNA, 25 bp, Homo sapiens
  source 1..25: mol_type = genomic DNA
ccgggccccacccctgcctggggtt

SEQ ID NO: 1914 - DNA, 25 bp, Homo sapiens
  source 1..25: mol_type = genomic DNA
cgggccccacccctgcctggggttt

SEQ ID NO: 1915 - DNA, 25 bp, Homo sapiens
  source 1..25: mol_type = genomic DNA
gggccccacccctgcctggggtttg

SEQ ID NO: 1916 - DNA, 25 bp, Homo sapiens
  source 1..25: mol_type = genomic DNA
ggccccacccctgcctggggtttgc

SEQ ID NO: 1917 - DNA, 25 bp, Homo sapiens
  source 1..25: mol_type = genomic DNA
gccccacccctgcctggggtttgct

SEQ ID NO: 1918 - DNA, 25 bp, Homo sapiens
  source 1..25: mol_type = genomic DNA
ccccacccctgcctggggtttgctt

SEQ ID NO: 1919 - DNA, 25 bp, Homo sapiens
  source 1..25: mol_type = genomic DNA
cccacccctgcctggggtttgcttc

SEQ ID NO: 1920 - DNA, 25 bp, Homo sapiens
  source 1..25: mol_type = genomic DNA
ccacccctgcctggggtttgcttca

SEQ ID NO: 1921 - DNA, 25 bp, Homo sapiens
  source 1..25: mol_type = genomic DNA
cacccctgcctggggtttgcttcaa

SEQ ID NO: 1922 - DNA, 25 bp, Homo sapiens
  source 1..25: mol_type = genomic DNA
acccctgcctggggtttgcttcaag

SEQ ID NO: 1923 - DNA, 25 bp, Homo sapiens
  source 1..25: mol_type = genomic DNA
cccctgcctggggtttgcttcaaga

SEQ ID NO: 1924 - DNA, 25 bp, Homo sapiens
  source 1..25: mol_type = genomic DNA
ccctgcctggggtttgcttcaagag

SEQ ID NO: 1925 - DNA, 25 bp, Homo sapiens
  source 1..25: mol_type = genomic DNA
cctgcctggggtttgcttcaagagc

SEQ ID NO: 1926 - DNA, 25 bp, Homo sapiens
  source 1..25: mol_type = genomic DNA
ctgcctggggtttgcttcaagagcc

SEQ ID NO: 1927 - DNA, 25 bp, Homo sapiens
  source 1..25: mol_type = genomic DNA
tgcctggggtttgcttcaagagccc

SEQ ID NO: 1928 - DNA, 25 bp, Homo sapiens
  source 1..25: mol_type = genomic DNA
gcctggggtttgcttcaagagccct

SEQ ID NO: 1929 - DNA, 25 bp, Homo sapiens
  source 1..25: mol_type = genomic DNA
cctggggtttgcttcaagagccctg

SEQ ID NO: 1930 - DNA, 25 bp, Homo sapiens
  source 1..25: mol_type = genomic DNA
ctggggtttgcttcaagagccctgg

SEQ ID NO: 1931 - DNA, 25 bp, Homo sapiens
  source 1..25: mol_type = genomic DNA
tggggtttgcttcaagagccctggg

SEQ ID NO: 1932 - DNA, 25 bp, Homo sapiens
  source 1..25: mol_type = genomic DNA
ggggtttgcttcaagagccctgggt

SEQ ID NO: 1933 - DNA, 25 bp, Homo sapiens
  source 1..25: mol_type = genomic DNA
gggtttgcttcaagagccctgggtg

SEQ ID NO: 1934 - DNA, 25 bp, Homo sapiens
  source 1..25: mol_type = genomic DNA
ggtttgcttcaagagccctgggtgg

SEQ ID NO: 1935 - DNA, 25 bp, Homo sapiens
  source 1..25: mol_type = genomic DNA
gtttgcttcaagagccctgggtgga

SEQ ID NO: 1936 - DNA, 25 bp, Homo sapiens
  source 1..25: mol_type = genomic DNA
tttgcttcaagagccctgggtggag

SEQ ID NO: 1937 - DNA, 25 bp, Homo sapiens
  source 1..25: mol_type = genomic DNA
ttgcttcaagagccctgggtggagg

SEQ ID NO: 1938 - DNA, 25 bp, Homo sapiens
  source 1..25: mol_type = genomic DNA
tgcttcaagagccctgggtggaggg

SEQ ID NO: 1939 - DNA, 25 bp, Homo sapiens
  source 1..25: mol_type = genomic DNA
gcttcaagagccctgggtggaggga

SEQ ID NO: 1940 - DNA, 25 bp, Homo sapiens
  source 1..25: mol_type = genomic DNA
cttcaagagccctgggtggagggat

SEQ ID NO: 1941 - DNA, 25 bp, Homo sapiens
  source 1..25: mol_type = genomic DNA
ttcaagagccctgggtggagggatg

SEQ ID NO: 1942 - DNA, 25 bp, Homo sapiens
  source 1..25: mol_type = genomic DNA
tcaagagccctgggtggagggatgg

SEQ ID NO: 1943 - DNA, 25 bp, Homo sapiens
  source 1..25: mol_type = genomic DNA
caagagccctgggtggagggatgga

SEQ ID NO: 1944 - DNA, 25 bp, Homo sapiens
  source 1..25: mol_type = genomic DNA
aagagccctgggtggagggatggag

SEQ ID NO: 1945 - DNA, 25 bp, Homo sapiens
  source 1..25: mol_type = genomic DNA
agagccctgggtggagggatggagt

SEQ ID NO: 1946 - DNA, 25 bp, Homo sapiens
  source 1..25: mol_type = genomic DNA
gagccctgggtggagggatggagtc

SEQ ID NO: 1947 - DNA, 25 bp, Homo sapiens
  source 1..25: mol_type = genomic DNA
agccctgggtggagggatggagtca

SEQ ID NO: 1948 - DNA, 25 bp, Homo sapiens
  source 1..25: mol_type = genomic DNA
gccctgggtggagggatggagtcag

SEQ ID NO: 1949 - DNA, 25 bp, Homo sapiens
  source 1..25: mol_type = genomic DNA
ccctgggtggagggatggagtcagt

SEQ ID NO: 1950 - DNA, 25 bp, Homo sapiens
  source 1..25: mol_type = genomic DNA
cctgggtggagggatggagtcagtg

SEQ ID NO: 1951 - DNA, 25 bp, Homo sapiens
  source 1..25: mol_type = genomic DNA
ctgggtggagggatggagtcagtgg

SEQ ID NO: 1952 - DNA, 25 bp, Homo sapiens
  source 1..25: mol_type = genomic DNA
tgggtggagggatggagtcagtggt

SEQ ID NO: 1953 - DNA, 25 bp, Homo sapiens
  source 1..25: mol_type = genomic DNA
gggtggagggatggagtcagtggtg

SEQ ID NO: 1954 - DNA, 25 bp, Homo sapiens
  source 1..25: mol_type = genomic DNA
ggtggagggatggagtcagtggtgg

SEQ ID NO: 1955 - DNA, 25 bp, Homo sapiens
  source 1..25: mol_type = genomic DNA
gtggagggatggagtcagtggtggc

SEQ ID NO: 1956 - DNA, 25 bp, Homo sapiens
  source 1..25: mol_type = genomic DNA
tggagggatggagtcagtggtggct

SEQ ID NO: 1957 - DNA, 25 bp, Homo sapiens
  source 1..25: mol_type = genomic DNA
ggagggatggagtcagtggtggctc

SEQ ID NO: 1958 - DNA, 25 bp, Homo sapiens
  source 1..25: mol_type = genomic DNA
gagggatggagtcagtggtggctct

SEQ ID NO: 1959 - DNA, 25 bp, Homo sapiens
  source 1..25: mol_type = genomic DNA
agggatggagtcagtggtggctctg

SEQ ID NO: 1960 - DNA, 25 bp, Homo sapiens
  source 1..25: mol_type = genomic DNA
gggatggagtcagtggtggctctgg

SEQ ID NO: 1961 - DNA, 25 bp, Homo sapiens
  source 1..25: mol_type = genomic DNA
ggatggagtcagtggtggctctggc

SEQ ID NO: 1962 - DNA, 25 bp, Homo sapiens
  source 1..25: mol_type = genomic DNA
gatggagtcagtggtggctctggct

SEQ ID NO: 1963 - DNA, 25 bp, Homo sapiens
  source 1..25: mol_type = genomic DNA
atggagtcagtggtggctctggctg

SEQ ID NO: 1964 - DNA, 25 bp, Homo sapiens
  source 1..25: mol_type = genomic DNA
tggagtcagtggtggctctggctgg

SEQ ID NO: 1965 - DNA, 25 bp, Homo sapiens
  source 1..25: mol_type = genomic DNA
ggagtcagtggtggctctggctgga

SEQ ID NO: 1966 - DNA, 25 bp, Homo sapiens
  source 1..25: mol_type = genomic DNA
gagtcagtggtggctctggctggag

SEQ ID NO: 1967 - DNA, 25 bp, Homo sapiens
  source 1..25: mol_type = genomic DNA
agtcagtggtggctctggctggagc

SEQ ID NO: 1968 - DNA, 25 bp, Homo sapiens
  source 1..25: mol_type = genomic DNA
gtcagtggtggctctggctggagcc

SEQ ID NO: 1969 - DNA, 25 bp, Homo sapiens
  source 1..25: mol_type = genomic DNA
tcagtggtggctctggctggagccc

SEQ ID NO: 1970 - DNA, 25 bp, Homo sapiens
  source 1..25: mol_type = genomic DNA
cagtggtggctctggctggagccca

SEQ ID NO: 1971 - DNA, 25 bp, Homo sapiens
  source 1..25: mol_type = genomic DNA
agtggtggctctggctggagcccat

SEQ ID NO: 1972 - DNA, 25 bp, Homo sapiens
  source 1..25: mol_type = genomic DNA
gtggtggctctggctggagcccatc

SEQ ID NO: 1973 - DNA, 25 bp, Homo sapiens
  source 1..25: mol_type = genomic DNA
tggtggctctggctggagcccatca

SEQ ID NO: 1974 - DNA, 25 bp, Homo sapiens
  source 1..25: mol_type = genomic DNA
ggtggctctggctggagcccatcag

SEQ ID NO: 1975 - DNA, 25 bp, Homo sapiens
  source 1..25: mol_type = genomic DNA
gtggctctggctggagcccatcagg

SEQ ID NO: 1976 - DNA, 25 bp, Homo sapiens
  source 1..25: mol_type = genomic DNA
tggctctggctggagcccatcaggt

SEQ ID NO: 1977 - DNA, 25 bp, Homo sapiens
  source 1..25: mol_type = genomic DNA
ggctctggctggagcccatcaggtg

SEQ ID NO: 1978 - DNA, 25 bp, Homo sapiens
  source 1..25: mol_type = genomic DNA
gctctggctggagcccatcaggtgt

SEQ ID NO: 1979 - DNA, 25 bp, Homo sapiens
  source 1..25: mol_type = genomic DNA
ctctggctggagcccatcaggtgtg

SEQ ID NO: 1980 - DNA, 25 bp, Homo sapiens
  source 1..25: mol_type = genomic DNA
tctggctggagcccatcaggtgtga

SEQ ID NO: 1981 - DNA, 25 bp, Homo sapiens
  source 1..25: mol_type = genomic DNA
ctggctggagcccatcaggtgtgaa

SEQ ID NO: 1982 - DNA, 25 bp, Homo sapiens
  source 1..25: mol_type = genomic DNA
tggctggagcccatcaggtgtgaac

SEQ ID NO: 1983 - DNA, 25 bp, Homo sapiens
  source 1..25: mol_type = genomic DNA
ggctggagcccatcaggtgtgaacg

SEQ ID NO: 1984 - DNA, 25 bp, Homo sapiens
  source 1..25: mol_type = genomic DNA
gctggagcccatcaggtgtgaacga

SEQ ID NO: 1985 - DNA, 25 bp, Homo sapiens
  source 1..25: mol_type = genomic DNA
ctggagcccatcaggtgtgaacgag

SEQ ID NO: 1986 - DNA, 25 bp, Homo sapiens
  source 1..25: mol_type = genomic DNA
tggagcccatcaggtgtgaacgagc

SEQ ID NO: 1987 - DNA, 25 bp, Homo sapiens
  source 1..25: mol_type = genomic DNA
ggagcccatcaggtgtgaacgagcc

SEQ ID NO: 1988 - DNA, 25 bp, Homo sapiens
  source 1..25: mol_type = genomic DNA
gagcccatcaggtgtgaacgagcct

SEQ ID NO: 1989 - DNA, 25 bp, Homo sapiens
  source 1..25: mol_type = genomic DNA
agcccatcaggtgtgaacgagcctc

SEQ ID NO: 1990 - DNA, 25 bp, Homo sapiens
  source 1..25: mol_type = genomic DNA
gcccatcaggtgtgaacgagcctcc

SEQ ID NO: 1991 - DNA, 25 bp, Homo sapiens
  source 1..25: mol_type = genomic DNA
cccatcaggtgtgaacgagcctccc

SEQ ID NO: 1992 - DNA, 25 bp, Homo sapiens
  source 1..25: mol_type = genomic DNA
ccatcaggtgtgaacgagcctccct

SEQ ID NO: 1993 - DNA, 25 bp, Homo sapiens
  source 1..25: mol_type = genomic DNA
catcaggtgtgaacgagcctccctc

SEQ ID NO: 1994 - DNA, 25 bp, Homo sapiens
  source 1..25: mol_type = genomic DNA
atcaggtgtgaacgagcctccctcc

SEQ ID NO: 1995 - DNA, 25 bp, Homo sapiens
  source 1..25: mol_type = genomic DNA
tcaggtgtgaacgagcctccctccc

SEQ ID NO: 1996 - DNA, 25 bp, Homo sapiens
  source 1..25: mol_type = genomic DNA
caggtgtgaacgagcctccctcccc

SEQ ID NO: 1997 - DNA, 25 bp, Homo sapiens
  source 1..25: mol_type = genomic DNA
aggtgtgaacgagcctccctcccct

SEQ ID NO: 1998 - DNA, 25 bp, Homo sapiens
  source 1..25: mol_type = genomic DNA
ggtgtgaacgagcctccctcccctt

SEQ ID NO: 1999 - DNA, 25 bp, Homo sapiens
  source 1..25: mol_type = genomic DNA
gtgtgaacgagcctccctccccttt

SEQ ID NO: 2000 - DNA, 25 bp, Homo sapiens
  source 1..25: mol_type = genomic DNA
tgtgaacgagcctccctcccctttc

SEQ ID NO: 2001 - DNA, 25 bp, Homo sapiens
  source 1..25: mol_type = genomic DNA
gtgaacgagcctccctcccctttct

SEQ ID NO: 2002 - DNA, 25 bp, Homo sapiens
  source 1..25: mol_type = genomic DNA
tgaacgagcctccctcccctttctt

SEQ ID NO: 2003 - DNA, 25 bp, Homo sapiens
  source 1..25: mol_type = genomic DNA
gaacgagcctccctcccctttcttc

SEQ ID NO: 2004 - DNA, 25 bp, Homo sapiens
  source 1..25: mol_type = genomic DNA
aacgagcctccctcccctttcttct

SEQ ID NO: 2005 - DNA, 25 bp, Homo sapiens
  source 1..25: mol_type = genomic DNA
acgagcctccctcccctttcttctc

SEQ ID NO: 2006 - DNA, 25 bp, Homo sapiens
  source 1..25: mol_type = genomic DNA
cgagcctccctcccctttcttctcg

SEQ ID NO: 2007 - DNA, 25 bp, Homo sapiens
  source 1..25: mol_type = genomic DNA
gagcctccctcccctttcttctcgg

SEQ ID NO: 2008 - DNA, 25 bp, Homo sapiens
  source 1..25: mol_type = genomic DNA
agcctccctcccctttcttctcggt

SEQ ID NO: 2009 - DNA, 25 bp, Homo sapiens
  source 1..25: mol_type = genomic DNA
gcctccctcccctttcttctcggtg

SEQ ID NO: 2010 - DNA, 25 bp, Homo sapiens
  source 1..25: mol_type = genomic DNA
cctccctcccctttcttctcggtgc

SEQ ID NO: 2011 - DNA, 25 bp, Homo sapiens
  source 1..25: mol_type = genomic DNA
ctccctcccctttcttctcggtgct

SEQ ID NO: 2012 - DNA, 25 bp, Homo sapiens
  source 1..25: mol_type = genomic DNA
tccctcccctttcttctcggtgctt

SEQ ID NO: 2013 - DNA, 25 bp, Homo sapiens
  source 1..25: mol_type = genomic DNA
ccctcccctttcttctcggtgcttc

SEQ ID NO: 2014 - DNA, 25 bp, Homo sapiens
  source 1..25: mol_type = genomic DNA
cctcccctttcttctcggtgcttct

SEQ ID NO: 2015 - DNA, 25 bp, Homo sapiens
  source 1..25: mol_type = genomic DNA
ctcccctttcttctcggtgcttctt

SEQ ID NO: 2016 - DNA, 25 bp, Homo sapiens
  source 1..25: mol_type = genomic DNA
tcccctttcttctcggtgcttcttc

SEQ ID NO: 2017 - DNA, 25 bp, Homo sapiens
  source 1..25: mol_type = genomic DNA
cccctttcttctcggtgcttcttct

SEQ ID NO: 2018 - DNA, 25 bp, Homo sapiens
  source 1..25: mol_type = genomic DNA
ccctttcttctcggtgcttcttctc

SEQ ID NO: 2019 - DNA, 25 bp, Homo sapiens
  source 1..25: mol_type = genomic DNA
cctttcttctcggtgcttcttctcg

SEQ ID NO: 2020 - DNA, 25 bp, Homo sapiens
  source 1..25: mol_type = genomic DNA
ctttcttctcggtgcttcttctcgt

SEQ ID NO: 2021 - DNA, 25 bp, Homo sapiens
  source 1..25: mol_type = genomic DNA
tttcttctcggtgcttcttctcgtg

SEQ ID NO: 2022 - DNA, 25 bp, Homo sapiens
  source 1..25: mol_type = genomic DNA
ttcttctcggtgcttcttctcgtga

SEQ ID NO: 2023 - DNA, 25 bp, Homo sapiens
  source 1..25: mol_type = genomic DNA
tcttctcggtgcttcttctcgtgac

SEQ ID NO: 2024 - DNA, 25 bp, Homo sapiens
  source 1..25: mol_type = genomic DNA
cttctcggtgcttcttctcgtgact

SEQ ID NO: 2025 - DNA, 25 bp, Homo sapiens
  source 1..25: mol_type = genomic DNA
ttctcggtgcttcttctcgtgactt

SEQ ID NO: 2026 - DNA, 25 bp, Homo sapiens
  source 1..25: mol_type = genomic DNA
tctcggtgcttcttctcgtgacttg

SEQ ID NO: 2027 - DNA, 25 bp, Homo sapiens
  source 1..25: mol_type = genomic DNA
ctcggtgcttcttctcgtgacttgg

SEQ ID NO: 2028 - DNA, 25 bp, synthetic construct
  source 1..25: mol_type = other DNA
tcaccaccaccaccaccatcatcac

SEQ ID NO: 2029 - DNA, 25 bp, synthetic construct
  source 1..25: mol_type = other DNA
atcaccaccaccaccaccatcatca

SEQ ID NO: 2030 - DNA, 25 bp, synthetic construct
  source 1..25: mol_type = other DNA
catcaccaccaccaccaccatcatc

SEQ ID NO: 2031 - DNA, 25 bp, synthetic construct
  source 1..25: mol_type = other DNA
ccatcaccaccaccaccaccatcat

SEQ ID NO: 2032 - DNA, 25 bp, synthetic construct
  source 1..25: mol_type = other DNA
accatcaccaccaccaccaccatca

SEQ ID NO: 2033 - DNA, 25 bp, synthetic construct
  source 1..25: mol_type = other DNA
caccatcaccaccaccaccaccatc

SEQ ID NO: 2034 - DNA, 25 bp, synthetic construct
  source 1..25: mol_type = other DNA
tcaccatcaccaccaccaccaccat

SEQ ID NO: 2035 - DNA, 25 bp, synthetic construct
  source 1..25: mol_type = other DNA
atcaccatcaccaccaccaccacca

SEQ ID NO: 2036 - DNA, 25 bp, synthetic construct
  source 1..25: mol_type = other DNA
catcaccatcaccaccaccaccacc

SEQ ID NO: 2037 - DNA, 25 bp, synthetic construct
  source 1..25: mol_type = other DNA
ccatcaccatcaccaccaccaccac

SEQ ID NO: 2038 - DNA, 25 bp, synthetic construct
  source 1..25: mol_type = other DNA
accatcaccatcaccaccaccacca

SEQ ID NO: 2039 - DNA, 25 bp, synthetic construct
  source 1..25: mol_type = other DNA
caccatcaccatcaccaccaccacc

SEQ ID NO: 2040 - DNA, 25 bp, synthetic construct
  source 1..25: mol_type = other DNA
ccaccatcaccatcaccaccaccac

SEQ ID NO: 2041 - DNA, 25 bp, synthetic construct
  source 1..25: mol_type = other DNA
accaccatcaccatcaccaccacca

SEQ ID NO: 2042 - DNA, 25 bp, synthetic construct
  source 1..25: mol_type = other DNA
caccaccatcaccatcaccaccacc

SEQ ID NO: 2043 - DNA, 25 bp, synthetic construct
  source 1..25: mol_type = other DNA
tcaccaccatcaccatcaccaccac

SEQ ID NO: 2044 - DNA, 25 bp, synthetic construct
  source 1..25: mol_type = other DNA
atcaccaccatcaccatcaccacca

SEQ ID NO: 2045 - DNA, 25 bp, synthetic construct
  source 1..25: mol_type = other DNA
catcaccaccatcaccatcaccacc

SEQ ID NO: 2046 - DNA, 25 bp, synthetic construct
  source 1..25: mol_type = other DNA
ccatcaccaccatcaccatcaccac

SEQ ID NO: 2047 - DNA, 25 bp, synthetic construct
  source 1..25: mol_type = other DNA
accatcaccaccatcaccatcacca

SEQ ID NO: 2048 - DNA, 25 bp, synthetic construct
  source 1..25: mol_type = other DNA
caccatcaccaccatcaccatcacc

SEQ ID NO: 2049 - DNA, 25 bp, synthetic construct
  source 1..25: mol_type = other DNA
tcaccatcaccaccatcaccatcac

SEQ ID NO: 2050 - DNA, 25 bp, synthetic construct
  source 1..25: mol_type = other DNA
atcaccatcaccaccatcaccatca

SEQ ID NO: 2051 - DNA, 25 bp, synthetic construct
  source 1..25: mol_type = other DNA
catcaccatcaccaccatcaccatc

SEQ ID NO: 2052 - DNA, 25 bp, synthetic construct
  source 1..25: mol_type = other DNA
ccatcaccatcaccaccatcaccat

SEQ ID NO: 2053 - DNA, 25 bp, synthetic construct
  source 1..25: mol_type = other DNA
accatcaccatcaccaccatcacca

SEQ ID NO: 2054 - DNA, 25 bp, synthetic construct
  source 1..25: mol_type = other DNA
caccatcaccatcaccaccatcacc

SEQ ID NO: 2055 - DNA, 25 bp, synthetic construct
  source 1..25: mol_type = other DNA
ccaccatcaccatcaccaccatcac

SEQ ID NO: 2056 - DNA, 25 bp, synthetic construct
  source 1..25: mol_type = other DNA
accaccatcaccatcaccaccatca

SEQ ID NO: 2057 - DNA, 25 bp, synthetic construct
  source 1..25: mol_type = other DNA
caccaccatcaccatcaccaccatc

SEQ ID NO: 2058 - DNA, 25 bp, synthetic construct
  source 1..25: mol_type = other DNA
ccaccaccatcaccatcaccaccat

SEQ ID NO: 2059 - DNA, 25 bp, synthetic construct
  source 1..25: mol_type = other DNA
accaccaccatcaccatcaccacca

SEQ ID NO: 2060 - DNA, 25 bp, synthetic construct
  source 1..25: mol_type = other DNA
caccaccaccatcaccatcaccacc

SEQ ID NO: 2061 - DNA, 25 bp, synthetic construct
  source 1..25: mol_type = other DNA
ccaccaccaccatcaccatcaccac

SEQ ID NO: 2062 - DNA, 25 bp, synthetic construct
  source 1..25: mol_type = other DNA
accaccaccaccatcaccatcacca

SEQ ID NO: 2063 - DNA, 25 bp, synthetic construct
  source 1..25: mol_type = other DNA
caccaccaccaccatcaccatcacc

SEQ ID NO: 2064 - DNA, 25 bp, synthetic construct
  source 1..25: mol_type = other DNA
ccaccaccaccaccatcaccatcac

SEQ ID NO: 2065 - DNA, 25 bp, synthetic construct
  source 1..25: mol_type = other DNA
accaccaccaccaccatcaccatca

SEQ ID NO: 2066 - DNA, 25 bp, synthetic construct
  source 1..25: mol_type = other DNA
caccaccaccaccaccatcaccatc

SEQ ID NO: 2067 - DNA, 25 bp, synthetic construct
  source 1..25: mol_type = other DNA
ccaccaccaccaccaccatcaccat

SEQ ID NO: 2068 - DNA, 25 bp, synthetic construct
  source 1..25: mol_type = other DNA
accaccaccaccaccaccatcacca

SEQ ID NO: 2069 - DNA, 25 bp, synthetic construct
  source 1..25: mol_type = other DNA
caccaccaccaccaccaccatcacc

SEQ ID NO: 2070 - DNA, 25 bp, synthetic construct
  source 1..25: mol_type = other DNA
ccaccaccaccaccaccaccatcac

SEQ ID NO: 2071 - DNA, 25 bp, synthetic construct
  source 1..25: mol_type = other DNA
accaccaccaccaccaccaccatca

SEQ ID NO: 2072 - DNA, 25 bp, synthetic construct
  source 1..25: mol_type = other DNA
caccaccaccaccaccaccaccatc

SEQ ID NO: 2073 - DNA, 25 bp, synthetic construct
  source 1..25: mol_type = other DNA
tcaccaccaccaccaccaccaccat

SEQ ID NO: 2074 - DNA, 25 bp, synthetic construct
  source 1..25: mol_type = other DNA
atcaccaccaccaccaccaccacca

SEQ ID NO: 2075 - DNA, 25 bp, synthetic construct
  source 1..25: mol_type = other DNA
catcaccaccaccaccaccaccacc

SEQ ID NO: 2076 - DNA, 25 bp, synthetic construct
  source 1..25: mol_type = other DNA
ccatcaccaccaccaccaccaccac

SEQ ID NO: 2077 - DNA, 25 bp, synthetic construct
  source 1..25: mol_type = other DNA
accatcaccaccaccaccaccacca

SEQ ID NO: 2078 - DNA, 25 bp, synthetic construct
  source 1..25: mol_type = other DNA
caccatcaccaccaccaccaccacc

SEQ ID NO: 2079 - DNA, 25 bp, synthetic construct
  source 1..25: mol_type = other DNA
ccaccatcaccaccaccaccaccac

SEQ ID NO: 2080 - DNA, 25 bp, synthetic construct
  source 1..25: mol_type = other DNA
accaccatcaccaccaccaccacca

SEQ ID NO: 2081 - DNA, 25 bp, synthetic construct
  source 1..25: mol_type = other DNA
caccaccatcaccaccaccaccacc

SEQ ID NO: 2082 - DNA, 25 bp, synthetic construct
  source 1..25: mol_type = other DNA
ccaccaccatcaccaccaccaccac

SEQ ID NO: 2083 - DNA, 25 bp, synthetic construct
  source 1..25: mol_type = other DNA
accaccaccatcaccaccaccacca

SEQ ID NO: 2084 - DNA, 25 bp, synthetic construct
  source 1..25: mol_type = other DNA
caccaccaccatcaccaccaccacc

SEQ ID NO: 2085 - DNA, 25 bp, synthetic construct
  source 1..25: mol_type = other DNA
tcaccaccaccatcaccaccaccac

SEQ ID NO: 2086 - DNA, 25 bp, synthetic construct
  source 1..25: mol_type = other DNA
atcaccaccaccatcaccaccacca

SEQ ID NO: 2087 - DNA, 25 bp, synthetic construct
  source 1..25: mol_type = other DNA
catcaccaccaccatcaccaccacc

SEQ ID NO: 2088 - DNA, 25 bp, synthetic construct
  source 1..25: mol_type = other DNA
ccatcaccaccaccatcaccaccac

SEQ ID NO: 2089 - DNA, 25 bp, synthetic construct
  source 1..25: mol_type = other DNA
accatcaccaccaccatcaccacca

SEQ ID NO: 2090 - DNA, 25 bp, synthetic construct
  source 1..25: mol_type = other DNA
aaccatcaccaccaccatcaccacc

SEQ ID NO: 2091 - DNA, 25 bp, synthetic construct
  source 1..25: mol_type = other DNA
aaaccatcaccaccaccatcaccac

SEQ ID NO: 2092 - DNA, 25 bp, synthetic construct
  source 1..25: mol_type = other DNA
aaaaccatcaccaccaccatcacca

SEQ ID NO: 2093 - DNA, 25 bp, synthetic construct
  source 1..25: mol_type = other DNA
caaaaccatcaccaccaccatcacc

SEQ ID NO: 2094 - DNA, 25 bp, synthetic construct
  source 1..25: mol_type = other DNA
ccaaaaccatcaccaccaccatcac

SEQ ID NO: 2095 - DNA, 25 bp, synthetic construct
  source 1..25: mol_type = other DNA
accaaaaccatcaccaccaccatca

SEQ ID NO: 2096 - DNA, 25 bp, synthetic construct
  source 1..25: mol_type = other DNA
caccaaaaccatcaccaccaccatc

SEQ ID NO: 2097 - DNA, 25 bp, synthetic construct
  source 1..25: mol_type = other DNA
ccaccaaaaccatcaccaccaccat

SEQ ID NO: 2098 - DNA, 25 bp, synthetic construct
  source 1..25: mol_type = other DNA
accaccaaaaccatcaccaccacca

SEQ ID NO: 2099 - DNA, 25 bp, synthetic construct
  source 1..25: mol_type = other DNA
caccaccaaaaccatcaccaccacc

SEQ ID NO: 2100 - DNA, 25 bp, synthetic construct
  source 1..25: mol_type = other DNA
ccaccaccaaaaccatcaccaccac

SEQ ID NO: 2101 - DNA, 25 bp, synthetic construct
  source 1..25: mol_type = other DNA
accaccaccaaaaccatcaccacca

SEQ ID NO: 2102 - DNA, 25 bp, synthetic construct
  source 1..25: mol_type = other DNA
caccaccaccaaaaccatcaccacc

SEQ ID NO: 2103 - DNA, 25 bp, synthetic construct
  source 1..25: mol_type = other DNA
tcaccaccaccaaaaccatcaccac

SEQ ID NO: 2104 - DNA, 25 bp, synthetic construct
  source 1..25: mol_type = other DNA
atcaccaccaccaaaaccatcacca

SEQ ID NO: 2105 - DNA, 25 bp, synthetic construct
  source 1..25: mol_type = other DNA
catcaccaccaccaaaaccatcacc

SEQ ID NO: 2106 - DNA, 25 bp, synthetic construct
  source 1..25: mol_type = other DNA
ccatcaccaccaccaaaaccatcac

SEQ ID NO: 2107 - DNA, 25 bp, synthetic construct
  source 1..25: mol_type = other DNA
accatcaccaccaccaaaaccatca

SEQ ID NO: 2108 - DNA, 25 bp, synthetic construct
  source 1..25: mol_type = other DNA
caccatcaccaccaccaaaaccatc

SEQ ID NO: 2109 - DNA, 25 bp, synthetic construct
  source 1..25: mol_type = other DNA
ccaccatcaccaccaccaaaaccat

SEQ ID NO: 2110 - DNA, 25 bp, synthetic construct
  source 1..25: mol_type = other DNA
accaccatcaccaccaccaaaacca

SEQ ID NO: 2111 - DNA, 25 bp, synthetic construct
  source 1..25: mol_type = other DNA
gaccaccatcaccaccaccaaaacc

SEQ ID NO: 2112 - DNA, 25 bp, synthetic construct
  source 1..25: mol_type = other DNA
tgaccaccatcaccaccaccaaaac

SEQ ID NO: 2113 - DNA, 25 bp, synthetic construct
  source 1..25: mol_type = other DNA
atgaccaccatcaccaccaccaaaa

SEQ ID NO: 2114 - DNA, 25 bp, synthetic construct
  source 1..25: mol_type = other DNA
catgaccaccatcaccaccaccaaa

SEQ ID NO: 2115 - DNA, 25 bp, synthetic construct
  source 1..25: mol_type = other DNA
ccatgaccaccatcaccaccaccaa

SEQ ID NO: 2116 - DNA, 25 bp, synthetic construct
  source 1..25: mol_type = other DNA
accatgaccaccatcaccaccacca

SEQ ID NO: 2117 - DNA, 25 bp, synthetic construct
  source 1..25: mol_type = other DNA
caccatgaccaccatcaccaccacc

SEQ ID NO: 2118 - DNA, 25 bp, synthetic construct
  source 1..25: mol_type = other DNA
acaccatgaccaccatcaccaccac

SEQ ID NO: 2119 - DNA, 25 bp, synthetic construct
  source 1..25: mol_type = other DNA
aacaccatgaccaccatcaccacca

SEQ ID NO: 2120 - DNA, 25 bp, synthetic construct
  source 1..25: mol_type = other DNA
caacaccatgaccaccatcaccacc

SEQ ID NO: 2121 - DNA, 25 bp, synthetic construct
  source 1..25: mol_type = other DNA
tcaacaccatgaccaccatcaccac

SEQ ID NO: 2122 - DNA, 25 bp, synthetic construct
  source 1..25: mol_type = other DNA
atcaacaccatgaccaccatcacca

SEQ ID NO: 2123 - DNA, 25 bp, synthetic construct
  source 1..25: mol_type = other DNA
catcaacaccatgaccaccatcacc

SEQ ID NO: 2124 - DNA, 25 bp, synthetic construct
  source 1..25: mol_type = other DNA
acatcaacaccatgaccaccatcac

SEQ ID NO: 2125 - DNA, 25 bp, synthetic construct
  source 1..25: mol_type = other DNA
cacatcaacaccatgaccaccatca

SEQ ID NO: 2126 - DNA, 25 bp, synthetic construct
  source 1..25: mol_type = other DNA
tcacatcaacaccatgaccaccatc

SEQ ID NO: 2127 - DNA, 25 bp, synthetic construct
  source 1..25: mol_type = other DNA
atcacatcaacaccatgaccaccat

SEQ ID NO: 2128 - DNA, 25 bp, synthetic construct
  source 1..25: mol_type = other DNA
catcacatcaacaccatgaccacca

SEQ ID NO: 2129 - DNA, 25 bp, synthetic construct
  source 1..25: mol_type = other DNA
ccatcacatcaacaccatgaccacc

SEQ ID NO: 2130 - DNA, 25 bp, synthetic construct
  source 1..25: mol_type = other DNA
accatcacatcaacaccatgaccac

SEQ ID NO: 2131 - DNA, 25 bp, synthetic construct
  source 1..25: mol_type = other DNA
caccatcacatcaacaccatgacca

SEQ ID NO: 2132 - DNA, 25 bp, synthetic construct
  source 1..25: mol_type = other DNA
ccaccatcacatcaacaccatgacc

SEQ ID NO: 2133 - DNA, 25 bp, synthetic construct
  source 1..25: mol_type = other DNA
accaccatcacatcaacaccatgac

SEQ ID NO: 2134 - DNA, 25 bp, synthetic construct
  source 1..25: mol_type = other DNA
caccaccatcacatcaacaccatga

SEQ ID NO: 2135 - DNA, 25 bp, synthetic construct
  source 1..25: mol_type = other DNA
ccaccaccatcacatcaacaccatg

SEQ ID NO: 2136 - DNA, 25 bp, synthetic construct
  source 1..25: mol_type = other DNA
accaccaccatcacatcaacaccat

SEQ ID NO: 2137 - DNA, 25 bp, synthetic construct
  source 1..25: mol_type = other DNA
caccaccaccatcacatcaacacca

SEQ ID NO: 2138 - DNA, 25 bp, synthetic construct
  source 1..25: mol_type = other DNA
acaccaccaccatcacatcaacacc

SEQ ID NO: 2139 - DNA, 25 bp, synthetic construct
  source 1..25: mol_type = other DNA
aacaccaccaccatcacatcaacac

SEQ ID NO: 2140 - DNA, 25 bp, synthetic construct
  source 1..25: mol_type = other DNA
caacaccaccaccatcacatcaaca

SEQ ID NO: 2141 - DNA, 25 bp, synthetic construct
  source 1..25: mol_type = other DNA
ccaacaccaccaccatcacatcaac

SEQ ID NO: 2142 - DNA, 25 bp, synthetic construct
  source 1..25: mol_type = other DNA
accaacaccaccaccatcacatcaa

SEQ ID NO: 2143 - DNA, 25 bp, synthetic construct
  source 1..25: mol_type = other DNA
caccaacaccaccaccatcacatca

SEQ ID NO: 2144 - DNA, 25 bp, synthetic construct
  source 1..25: mol_type = other DNA
ccaccaacaccaccaccatcacatc

SEQ ID NO: 2145 - DNA, 25 bp, synthetic construct
  source 1..25: mol_type = other DNA
accaccaacaccaccaccatcacat

SEQ ID NO: 2146 - DNA, 25 bp, synthetic construct
  source 1..25: mol_type = other DNA
caccaccaacaccaccaccatcaca

SEQ ID NO: 2147 - DNA, 25 bp, synthetic construct
  source 1..25: mol_type = other DNA
ccaccaccaacaccaccaccatcac

SEQ ID NO: 2148 - DNA, 25 bp, synthetic construct
  source 1..25: mol_type = other DNA
accaccaccaacaccaccaccatca

SEQ ID NO: 2149 - DNA, 25 bp, synthetic construct
  source 1..25: mol_type = other DNA
caccaccaccaacaccaccaccatc

SEQ ID NO: 2150 - DNA, 25 bp, synthetic construct
  source 1..25: mol_type = other DNA
tcaccaccaccaacaccaccaccat

SEQ ID NO: 2151 - DNA, 25 bp, synthetic construct
  source 1..25: mol_type = other DNA
atcaccaccaccaacaccaccacca

SEQ ID NO: 2152 - DNA, 25 bp, synthetic construct
  source 1..25: mol_type = other DNA
catcaccaccaccaacaccaccacc

SEQ ID NO: 2153 - DNA, 25 bp, synthetic construct
  source 1..25: mol_type = other DNA
ccatcaccaccaccaacaccaccac

SEQ ID NO: 2154 - DNA, 25 bp, synthetic construct
  source 1..25: mol_type = other DNA
accatcaccaccaccaacaccacca

SEQ ID NO: 2155 - DNA, 25 bp, synthetic construct
  source 1..25: mol_type = other DNA
caccatcaccaccaccaacaccacc

SEQ ID NO: 2156 - DNA, 25 bp, synthetic construct
  source 1..25: mol_type = other DNA
tcaccatcaccaccaccaacaccac

SEQ ID NO: 2157 - DNA, 25 bp, synthetic construct
  source 1..25: mol_type = other DNA
atcaccatcaccaccaccaacacca

SEQ ID NO: 2158 - DNA, 25 bp, synthetic construct
  source 1..25: mol_type = other DNA
catcaccatcaccaccaccaacacc

SEQ ID NO: 2159 - DNA, 25 bp, synthetic construct
  source 1..25: mol_type = other DNA
gcatcaccatcaccaccaccaacac

SEQ ID NO: 2160 - DNA, 25 bp, synthetic construct
  source 1..25: mol_type = other DNA
agcatcaccatcaccaccaccaaca

SEQ ID NO: 2161 - DNA, 25 bp, synthetic construct
  source 1..25: mol_type = other DNA
aagcatcaccatcaccaccaccaac

SEQ ID NO: 2162 - DNA, 25 bp, synthetic construct
  source 1..25: mol_type = other DNA
gaagcatcaccatcaccaccaccaa

SEQ ID NO: 2163 - DNA, 25 bp, synthetic construct
  source 1..25: mol_type = other DNA
agaagcatcaccatcaccaccacca

SEQ ID NO: 2164 - DNA, 25 bp, synthetic construct
  source 1..25: mol_type = other DNA
cagaagcatcaccatcaccaccacc

SEQ ID NO: 2165 - DNA, 25 bp, synthetic construct
  source 1..25: mol_type = other DNA
ccagaagcatcaccatcaccaccac

SEQ ID NO: 2166 - DNA, 25 bp, synthetic construct
  source 1..25: mol_type = other DNA
accagaagcatcaccatcaccacca

SEQ ID NO: 2167 - DNA, 25 bp, synthetic construct
  source 1..25: mol_type = other DNA
caccagaagcatcaccatcaccacc

SEQ ID NO: 2168 - DNA, 25 bp, synthetic construct
  source 1..25: mol_type = other DNA
tcaccagaagcatcaccatcaccac

SEQ ID NO: 2169 - DNA, 25 bp, synthetic construct
  source 1..25: mol_type = other DNA
atcaccagaagcatcaccatcacca

SEQ ID NO: 2170 - DNA, 25 bp, synthetic construct
  source 1..25: mol_type = other DNA
catcaccagaagcatcaccatcacc

SEQ ID NO: 2171 - DNA, 25 bp, synthetic construct
  source 1..25: mol_type = other DNA
ccatcaccagaagcatcaccatcac

SEQ ID NO: 2172 - DNA, 25 bp, synthetic construct
  source 1..25: mol_type = other DNA
accatcaccagaagcatcaccatca

SEQ ID NO: 2173 - DNA, 25 bp, synthetic construct
  source 1..25: mol_type = other DNA
caccatcaccagaagcatcaccatc

SEQ ID NO: 2174 - DNA, 25 bp, synthetic construct
  source 1..25: mol_type = other DNA
ccaccatcaccagaagcatcaccat

SEQ ID NO: 2175 - DNA, 25 bp, synthetic construct
  source 1..25: mol_type = other DNA
accaccatcaccagaagcatcacca

SEQ ID NO: 2176 - DNA, 25 bp, synthetic construct
  source 1..25: mol_type = other DNA
gaccaccatcaccagaagcatcacc

SEQ ID NO: 2177 - DNA, 25 bp, synthetic construct
  source 1..25: mol_type = other DNA
tgaccaccatcaccagaagcatcac

SEQ ID NO: 2178 - DNA, 25 bp, synthetic construct
  source 1..25: mol_type = other DNA
atgaccaccatcaccagaagcatca

SEQ ID NO: 2179 - DNA, 25 bp, synthetic construct
  source 1..25: mol_type = other DNA
catgaccaccatcaccagaagcatc

SEQ ID NO: 2180 - DNA, 25 bp, synthetic construct
  source 1..25: mol_type = other DNA
tcatgaccaccatcaccagaagcat

SEQ ID NO: 2181 - DNA, 25 bp, synthetic construct
  source 1..25: mol_type = other DNA
atcatgaccaccatcaccagaagca

SEQ ID NO: 2182 - DNA, 25 bp, synthetic construct
  source 1..25: mol_type = other DNA
catcatgaccaccatcaccagaagc

SEQ ID NO: 2183 - DNA, 25 bp, synthetic construct
  source 1..25: mol_type = other DNA
ccatcatgaccaccatcaccagaag

SEQ ID NO: 2184 - DNA, 25 bp, synthetic construct
  source 1..25: mol_type = other DNA
accatcatgaccaccatcaccagaa

SEQ ID NO: 2185 - DNA, 25 bp, synthetic construct
  source 1..25: mol_type = other DNA
caccatcatgaccaccatcaccaga

SEQ ID NO: 2186 - DNA, 25 bp, synthetic construct
  source 1..25: mol_type = other DNA
ccaccatcatgaccaccatcaccag

SEQ ID NO: 2187 - DNA, 25 bp, synthetic construct
  source 1..25: mol_type = other DNA
accaccatcatgaccaccatcacca

SEQ ID NO: 2188 - DNA, 25 bp, synthetic construct
  source 1..25: mol_type = other DNA
caccaccatcatgaccaccatcacc

SEQ ID NO: 2189 - DNA, 25 bp, synthetic construct
  source 1..25: mol_type = other DNA
gcaccaccatcatgaccaccatcac

SEQ ID NO: 2190 - DNA, 25 bp, synthetic construct
  source 1..25: mol_type = other DNA
ggcaccaccatcatgaccaccatca

SEQ ID NO: 2191 - DNA, 25 bp, synthetic construct
  source 1..25: mol_type = other DNA
cggcaccaccatcatgaccaccatc

SEQ ID NO: 2192 - DNA, 25 bp, synthetic construct
  source 1..25: mol_type = other DNA
acggcaccaccatcatgaccaccat

SEQ ID NO: 2193 - DNA, 25 bp, synthetic construct
  source 1..25: mol_type = other DNA
gacggcaccaccatcatgaccacca

SEQ ID NO: 2194 - DNA, 25 bp, synthetic construct
  source 1..25: mol_type = other DNA
agacggcaccaccatcatgaccacc

SEQ ID NO: 2195 - DNA, 25 bp, synthetic construct
  source 1..25: mol_type = other DNA
cagacggcaccaccatcatgaccac

SEQ ID NO: 2196 - DNA, 25 bp, synthetic construct
  source 1..25: mol_type = other DNA
gcagacggcaccaccatcatgacca

SEQ ID NO: 2197 - DNA, 25 bp, synthetic construct
  source 1..25: mol_type = other DNA
ggcagacggcaccaccatcatgacc

SEQ ID NO: 2198 - DNA, 25 bp, synthetic construct
  source 1..25: mol_type = other DNA
aggcagacggcaccaccatcatgac

SEQ ID NO: 2199 - DNA, 25 bp, synthetic construct
  source 1..25: mol_type = other DNA
gaggcagacggcaccaccatcatga

SEQ ID NO: 2200 - DNA, 25 bp, synthetic construct
  source 1..25: mol_type = other DNA
agaggcagacggcaccaccatcatg

SEQ ID NO: 2201 - DNA, 25 bp, synthetic construct
  source 1..25: mol_type = other DNA
gagaggcagacggcaccaccatcat

SEQ ID NO: 2202 - DNA, 25 bp, synthetic construct
  source 1..25: mol_type = other DNA
tgagaggcagacggcaccaccatca

SEQ ID NO: 2203 - DNA, 25 bp, synthetic construct
  source 1..25: mol_type = other DNA
ctgagaggcagacggcaccaccatc

SEQ ID NO: 2204 - DNA, 25 bp, synthetic construct
  source 1..25: mol_type = other DNA
cctgagaggcagacggcaccaccat

SEQ ID NO: 2205 - DNA, 25 bp, synthetic construct
  source 1..25: mol_type = other DNA
tcctgagaggcagacggcaccacca

SEQ ID NO: 2206 - DNA, 25 bp, synthetic construct
  source 1..25: mol_type = other DNA
ctcctgagaggcagacggcaccacc

SEQ ID NO: 2207 - DNA, 25 bp, synthetic construct
  source 1..25: mol_type = other DNA
gctcctgagaggcagacggcaccac

SEQ ID NO: 2208 - DNA, 25 bp, synthetic construct
  source 1..25: mol_type = other DNA
agctcctgagaggcagacggcacca

SEQ ID NO: 2209 - DNA, 25 bp, synthetic construct
  source 1..25: mol_type = other DNA
cagctcctgagaggcagacggcacc

SEQ ID NO: 2210 - DNA, 25 bp, synthetic construct
  source 1..25: mol_type = other DNA
ccagctcctgagaggcagacggcac

SEQ ID NO: 2211 - DNA, 25 bp, synthetic construct
  source 1..25: mol_type = other DNA
accagctcctgagaggcagacggca

SEQ ID NO: 2212 - DNA, 25 bp, synthetic construct
  source 1..25: mol_type = other DNA
gaccagctcctgagaggcagacggc

SEQ ID NO: 2213 - DNA, 25 bp, synthetic construct
  source 1..25: mol_type = other DNA
tgaccagctcctgagaggcagacgg

SEQ ID NO: 2214 - DNA, 25 bp, synthetic construct
  source 1..25: mol_type = other DNA
gtgaccagctcctgagaggcagacg

SEQ ID NO: 2215 - DNA, 25 bp, synthetic construct
  source 1..25: mol_type = other DNA
agtgaccagctcctgagaggcagac

SEQ ID NO: 2216 - DNA, 25 bp, synthetic construct
  source 1..25: mol_type = other DNA
cagtgaccagctcctgagaggcaga

SEQ ID NO: 2217 - DNA, 25 bp, synthetic construct
  source 1..25: mol_type = other DNA
gcagtgaccagctcctgagaggcag

SEQ ID NO: 2218 - DNA, 25 bp, synthetic construct
  source 1..25: mol_type = other DNA
ggcagtgaccagctcctgagaggca

SEQ ID NO: 2219 - DNA, 25 bp, synthetic construct
  source 1..25: mol_type = other DNA
aggcagtgaccagctcctgagaggc

SEQ ID NO: 2220 - DNA, 25 bp, synthetic construct
  source 1..25: mol_type = other DNA
caggcagtgaccagctcctgagagg

SEQ ID NO: 2221 - DNA, 25 bp, synthetic construct
  source 1..25: mol_type = other DNA
ccaggcagtgaccagctcctgagag

SEQ ID NO: 2222 - DNA, 25 bp, synthetic construct
  source 1..25: mol_type = other DNA
accaggcagtgaccagctcctgaga

SEQ ID NO: 2223 - DNA, 25 bp, synthetic construct
  source 1..25: mol_type = other DNA
taccaggcagtgaccagctcctgag

SEQ ID NO: 2224 - DNA, 25 bp, synthetic construct
  source 1..25: mol_type = other DNA
gtaccaggcagtgaccagctcctga

SEQ ID NO: 2225 - DNA, 25 bp, synthetic construct
  source 1..25: mol_type = other DNA
tgtaccaggcagtgaccagctcctg

SEQ ID NO: 2226 - DNA, 25 bp, synthetic construct
  source 1..25: mol_type = other DNA
atgtaccaggcagtgaccagctcct

SEQ ID NO: 2227 - DNA, 25 bp, synthetic construct
  source 1..25: mol_type = other DNA
gatgtaccaggcagtgaccagctcc

SEQ ID NO: 2228 - DNA, 25 bp, synthetic construct
  source 1..25: mol_type = other DNA
cgatgtaccaggcagtgaccagctc

SEQ ID NO: 2229 - DNA, 25 bp, synthetic construct
  source 1..25: mol_type = other DNA
ccgatgtaccaggcagtgaccagct

SEQ ID NO: 2230 - DNA, 25 bp, synthetic construct
  source 1..25: mol_type = other DNA
gccgatgtaccaggcagtgaccagc

SEQ ID NO: 2231 - DNA, 25 bp, synthetic construct
  source 1..25: mol_type = other DNA
agccgatgtaccaggcagtgaccag

SEQ ID NO: 2232 - DNA, 25 bp, synthetic construct
  source 1..25: mol_type = other DNA
aagccgatgtaccaggcagtgacca

SEQ ID NO: 2233 - DNA, 25 bp, synthetic construct
  source 1..25: mol_type = other DNA
gaagccgatgtaccaggcagtgacc

SEQ ID NO: 2234 - DNA, 25 bp, synthetic construct
  source 1..25: mol_type = other DNA
ggaagccgatgtaccaggcagtgac

SEQ ID NO: 2235 - DNA, 25 bp, synthetic construct
  source 1..25: mol_type = other DNA
aggaagccgatgtaccaggcagtga

SEQ ID NO: 2236 - DNA, 25 bp, synthetic construct
  source 1..25: mol_type = other DNA
aaggaagccgatgtaccaggcagtg

SEQ ID NO: 2237 - DNA, 25 bp, synthetic construct
  source 1..25: mol_type = other DNA
aaaggaagccgatgtaccaggcagt

SEQ ID NO: 2238 - DNA, 25 bp, synthetic construct
  source 1..25: mol_type = other DNA
caaaggaagccgatgtaccaggcag

SEQ ID NO: 2239 - DNA, 25 bp, synthetic construct
  source 1..25: mol_type = other DNA
acaaaggaagccgatgtaccaggca

SEQ ID NO: 2240 - DNA, 25 bp, synthetic construct
  source 1..25: mol_type = other DNA
gacaaaggaagccgatgtaccaggc

SEQ ID NO: 2241 - DNA, 25 bp, synthetic construct
  source 1..25: mol_type = other DNA
agacaaaggaagccgatgtaccagg

SEQ ID NO: 2242 - DNA, 25 bp, synthetic construct
  source 1..25: mol_type = other DNA
gagacaaaggaagccgatgtaccag

SEQ ID NO: 2243 - DNA, 25 bp, synthetic construct
  source 1..25: mol_type = other DNA
tgagacaaaggaagccgatgtacca

SEQ ID NO: 2244 - DNA, 25 bp, synthetic construct
  source 1..25: mol_type = other DNA
atgagacaaaggaagccgatgtacc

SEQ ID NO: 2245 - DNA, 25 bp, synthetic construct
  source 1..25: mol_type = other DNA
gatgagacaaaggaagccgatgtac

SEQ ID NO: 2246 - DNA, 25 bp, synthetic construct
  source 1..25: mol_type = other DNA
ggatgagacaaaggaagccgatgta

SEQ ID NO: 2247 - DNA, 25 bp, synthetic construct
  source 1..25: mol_type = other DNA
aggatgagacaaaggaagccgatgt

SEQ ID NO: 2248 - DNA, 25 bp, synthetic construct
  source 1..25: mol_type = other DNA
caggatgagacaaaggaagccgatg

SEQ ID NO: 2249 - DNA, 25 bp, synthetic construct
  source 1..25: mol_type = other DNA
ccaggatgagacaaaggaagccgat

SEQ ID NO: 2250 - DNA, 25 bp, synthetic construct
  source 1..25: mol_type = other DNA
gccaggatgagacaaaggaagccga

SEQ ID NO: 2251 - DNA, 25 bp, synthetic construct
  source 1..25: mol_type = other DNA
ggccaggatgagacaaaggaagccg

SEQ ID NO: 2252 - DNA, 25 bp, synthetic construct
  source 1..25: mol_type = other DNA
aggccaggatgagacaaaggaagcc

SEQ ID NO: 2253 - DNA, 25 bp, synthetic construct
  source 1..25: mol_type = other DNA
gaggccaggatgagacaaaggaagc

SEQ ID NO: 2254 - DNA, 25 bp, synthetic construct
  source 1..25: mol_type = other DNA
cgaggccaggatgagacaaaggaag

SEQ ID NO: 2255 - DNA, 25 bp, synthetic construct
  source 1..25: mol_type = other DNA
acgaggccaggatgagacaaaggaa

SEQ ID NO: 2256 - DNA, 25 bp, synthetic construct
  source 1..25: mol_type = other DNA
aacgaggccaggatgagacaaagga

SEQ ID NO: 2257 - DNA, 25 bp, synthetic construct
  source 1..25: mol_type = other DNA
gaacgaggccaggatgagacaaagg

SEQ ID NO: 2258 - DNA, 25 bp, synthetic construct
  source 1..25: mol_type = other DNA
ggaacgaggccaggatgagacaaag

SEQ ID NO: 2259 - DNA, 25 bp, synthetic construct
  source 1..25: mol_type = other DNA
aggaacgaggccaggatgagacaaa

SEQ ID NO: 2260 - DNA, 25 bp, synthetic construct
  source 1..25: mol_type = other DNA
caggaacgaggccaggatgagacaa

SEQ ID NO: 2261 - DNA, 25 bp, synthetic construct
  source 1..25: mol_type = other DNA
ccaggaacgaggccaggatgagaca

SEQ ID NO: 2262 - DNA, 25 bp, synthetic construct
  source 1..25: mol_type = other DNA
accaggaacgaggccaggatgagac

SEQ ID NO: 2263 - DNA, 25 bp, synthetic construct
  source 1..25: mol_type = other DNA
caccaggaacgaggccaggatgaga

SEQ ID NO: 2264 - DNA, 25 bp, synthetic construct
  source 1..25: mol_type = other DNA
acaccaggaacgaggccaggatgag

SEQ ID NO: 2265 - DNA, 25 bp, synthetic construct
  source 1..25: mol_type = other DNA
tacaccaggaacgaggccaggatga

SEQ ID NO: 2266 - DNA, 25 bp, synthetic construct
  source 1..25: mol_type = other DNA
gtacaccaggaacgaggccaggatg

SEQ ID NO: 2267 - DNA, 25 bp, synthetic construct
  source 1..25: mol_type = other DNA
agtacaccaggaacgaggccaggat

SEQ ID NO: 2268 - DNA, 25 bp, synthetic construct
  source 1..25: mol_type = other DNA
aagtacaccaggaacgaggccagga

SEQ ID NO: 2269 - DNA, 25 bp, synthetic construct
  source 1..25: mol_type = other DNA
caagtacaccaggaacgaggccagg

SEQ ID NO: 2270 - DNA, 25 bp, synthetic construct
  source 1..25: mol_type = other DNA
ccaagtacaccaggaacgaggccag

SEQ ID NO: 2271 - DNA, 25 bp, synthetic construct
  source 1..25: mol_type = other DNA
gccaagtacaccaggaacgaggcca

SEQ ID NO: 2272 - DNA, 25 bp, synthetic construct
  source 1..25: mol_type = other DNA
tgccaagtacaccaggaacgaggcc

SEQ ID NO: 2273 - DNA, 25 bp, synthetic construct
  source 1..25: mol_type = other DNA
ctgccaagtacaccaggaacgaggc

SEQ ID NO: 2274 - DNA, 25 bp, synthetic construct
  source 1..25: mol_type = other DNA
tctgccaagtacaccaggaacgagg

SEQ ID NO: 2275 - DNA, 25 bp, synthetic construct
  source 1..25: mol_type = other DNA
ctctgccaagtacaccaggaacgag

SEQ ID NO: 2276 - DNA, 25 bp, synthetic construct
  source 1..25: mol_type = other DNA
tctctgccaagtacaccaggaacga

SEQ ID NO: 2277 - DNA, 25 bp, synthetic construct
  source 1..25: mol_type = other DNA
ttctctgccaagtacaccaggaacg

SEQ ID NO: 2278 - DNA, 25 bp, synthetic construct
  source 1..25: mol_type = other DNA
cttctctgccaagtacaccaggaac

SEQ ID NO: 2279 - DNA, 25 bp, synthetic construct
  source 1..25: mol_type = other DNA
ccttctctgccaagtacaccaggaa

SEQ ID NO: 2280 - DNA, 25 bp, synthetic construct
  source 1..25: mol_type = other DNA
cccttctctgccaagtacaccagga

SEQ ID NO: 2281 - DNA, 25 bp, synthetic construct
  source 1..25: mol_type = other DNA
ccccttctctgccaagtacaccagg

SEQ ID NO: 2282 - DNA, 25 bp, synthetic construct
  source 1..25: mol_type = other DNA
cccccttctctgccaagtacaccag

SEQ ID NO: 2283 - DNA, 25 bp, synthetic construct
  source 1..25: mol_type = other DNA
tcccccttctctgccaagtacacca

SEQ ID NO: 2284 - DNA, 25 bp, synthetic construct
  source 1..25: mol_type = other DNA
ctcccccttctctgccaagtacacc

SEQ ID NO: 2285 - DNA, 25 bp, synthetic construct
  source 1..25: mol_type = other DNA
tctcccccttctctgccaagtacac

SEQ ID NO: 2286 - DNA, 25 bp, synthetic construct
  source 1..25: mol_type = other DNA
ttctcccccttctctgccaagtaca

SEQ ID NO: 2287 - DNA, 25 bp, synthetic construct
  source 1..25: mol_type = other DNA
gttctcccccttctctgccaagtac

SEQ ID NO: 2288 - DNA, 25 bp, synthetic construct
  source 1..25: mol_type = other DNA
cgttctcccccttctctgccaagta

SEQ ID NO: 2289 - DNA, 25 bp, synthetic construct
  source 1..25: mol_type = other DNA
tcgttctcccccttctctgccaagt

SEQ ID NO: 2290 - DNA, 25 bp, synthetic construct
  source 1..25: mol_type = other DNA
gtcgttctcccccttctctgccaag

SEQ ID NO: 2291 - DNA, 25 bp, synthetic construct
  source 1..25: mol_type = other DNA
ggtcgttctcccccttctctgccaa

SEQ ID NO: 2292 - DNA, 25 bp, synthetic construct
  source 1..25: mol_type = other DNA
tggtcgttctcccccttctctgcca

SEQ ID NO: 2293 - DNA, 25 bp, synthetic construct
  source 1..25: mol_type = other DNA
gtggtcgttctcccccttctctgcc

SEQ ID NO: 2294 - DNA, 25 bp, synthetic construct
  source 1..25: mol_type = other DNA
agtggtcgttctcccccttctctgc

SEQ ID NO: 2295 - DNA, 25 bp, synthetic construct
  source 1..25: mol_type = other DNA
aagtggtcgttctcccccttctctg

SEQ ID NO: 2296 - DNA, 25 bp, synthetic construct
  source 1..25: mol_type = other DNA
aaagtggtcgttctcccccttctct

SEQ ID NO: 2297 - DNA, 25 bp, synthetic construct
  source 1..25: mol_type = other DNA
caaagtggtcgttctcccccttctc

SEQ ID NO: 2298 - DNA, 25 bp, synthetic construct
  source 1..25: mol_type = other DNA
tcaaagtggtcgttctcccccttct

SEQ ID NO: 2299 - DNA, 25 bp, synthetic construct
  source 1..25: mol_type = other DNA
gtcaaagtggtcgttctcccccttc

SEQ ID NO: 2300 - DNA, 25 bp, synthetic construct
  source 1..25: mol_type = other DNA
tgtcaaagtggtcgttctccccctt

SEQ ID NO: 2301 - DNA, 25 bp, synthetic construct
  source 1..25: mol_type = other DNA
gtgtcaaagtggtcgttctccccct

SEQ ID NO: 2302 - DNA, 25 bp, synthetic construct
  source 1..25: mol_type = other DNA
ggtgtcaaagtggtcgttctccccc

SEQ ID NO: 2303 - DNA, 25 bp, synthetic construct
  source 1..25: mol_type = other DNA
aggtgtcaaagtggtcgttctcccc

SEQ ID NO: 2304 - DNA, 25 bp, synthetic construct
  source 1..25: mol_type = other DNA
taggtgtcaaagtggtcgttctccc

SEQ ID NO: 2305 - DNA, 25 bp, synthetic construct
  source 1..25: mol_type = other DNA
gtaggtgtcaaagtggtcgttctcc

SEQ ID NO: 2306 - DNA, 25 bp, synthetic construct
  source 1..25: mol_type = other DNA
cgtaggtgtcaaagtggtcgttctc

SEQ ID NO: 2307 - DNA, 25 bp, synthetic construct
  source 1..25: mol_type = other DNA
gcgtaggtgtcaaagtggtcgttct

SEQ ID NO: 2308 - DNA, 25 bp, synthetic construct
  source 1..25: mol_type = other DNA
cgcgtaggtgtcaaagtggtcgttc

SEQ ID NO: 2309 - DNA, 25 bp, synthetic construct
  source 1..25: mol_type = other DNA
ccgcgtaggtgtcaaagtggtcgtt

SEQ ID NO: 2310 - DNA, 25 bp, synthetic construct
  source 1..25: mol_type = other DNA
tccgcgtaggtgtcaaagtggtcgt

SEQ ID NO: 2311 - DNA, 25 bp, synthetic construct
  source 1..25: mol_type = other DNA
atccgcgtaggtgtcaaagtggtcg

SEQ ID NO: 2312 - DNA, 25 bp, synthetic construct
  source 1..25: mol_type = other DNA
catccgcgtaggtgtcaaagtggtc

SEQ ID NO: 2313 - DNA, 25 bp, synthetic construct
  source 1..25: mol_type = other DNA
gcatccgcgtaggtgtcaaagtggt

SEQ ID NO: 2314 - DNA, 25 bp, synthetic construct
  source 1..25: mol_type = other DNA
tgcatccgcgtaggtgtcaaagtgg

SEQ ID NO: 2315 - DNA, 25 bp, synthetic construct
  source 1..25: mol_type = other DNA
gtgcatccgcgtaggtgtcaaagtg

SEQ ID NO: 2316 - DNA, 25 bp, synthetic construct
  source 1..25: mol_type = other DNA
agtgcatccgcgtaggtgtcaaagt

SEQ ID NO: 2317 - DNA, 25 bp, synthetic construct
  source 1..25: mol_type = other DNA
gagtgcatccgcgtaggtgtcaaag

SEQ ID NO: 2318 - DNA, 25 bp, synthetic construct
  source 1..25: mol_type = other DNA
agagtgcatccgcgtaggtgtcaaa

SEQ ID NO: 2319 - DNA, 25 bp, synthetic construct
  source 1..25: mol_type = other DNA
cagagtgcatccgcgtaggtgtcaa

SEQ ID NO: 2320 - DNA, 25 bp, synthetic construct
  source 1..25: mol_type = other DNA
ccagagtgcatccgcgtaggtgtca

SEQ ID NO: 2321 - DNA, 25 bp, synthetic construct
  source 1..25: mol_type = other DNA
accagagtgcatccgcgtaggtgtc

SEQ ID NO: 2322 - DNA, 25 bp, synthetic construct
  source 1..25: mol_type = other DNA
caccagagtgcatccgcgtaggtgt

SEQ ID NO: 2323 - DNA, 25 bp, synthetic construct
  source 1..25: mol_type = other DNA
ccaccagagtgcatccgcgtaggtg

SEQ ID NO: 2324 - DNA, 25 bp, synthetic construct
  source 1..25: mol_type = other DNA
cccaccagagtgcatccgcgtaggt

SEQ ID NO: 2325 - DNA, 25 bp, synthetic construct
  source 1..25: mol_type = other DNA
ccccaccagagtgcatccgcgtagg

SEQ ID NO: 2326 - DNA, 25 bp, synthetic construct
  source 1..25: mol_type = other DNA
gccccaccagagtgcatccgcgtag

SEQ ID NO: 2327 - DNA, 25 bp, synthetic construct
  source 1..25: mol_type = other DNA
ggccccaccagagtgcatccgcgta

SEQ ID NO: 2328 - DNA, 25 bp, synthetic construct
  source 1..25: mol_type = other DNA
aggccccaccagagtgcatccgcgt

SEQ ID NO: 2329 - DNA, 25 bp, synthetic construct
  source 1..25: mol_type = other DNA
caggccccaccagagtgcatccgcg

SEQ ID NO: 2330 - DNA, 25 bp, synthetic construct
  source 1..25: mol_type = other DNA
ccaggccccaccagagtgcatccgc

SEQ ID NO: 2331 - DNA, 25 bp, synthetic construct
  source 1..25: mol_type = other DNA
accaggccccaccagagtgcatccg

SEQ ID NO: 2332 - DNA, 25 bp, synthetic construct
  source 1..25: mol_type = other DNA
caccaggccccaccagagtgcatcc

SEQ ID NO: 2333 - DNA, 25 bp, synthetic construct
  source 1..25: mol_type = other DNA
tcaccaggccccaccagagtgcatc

SEQ ID NO: 2334 - DNA, 25 bp, synthetic construct
  source 1..25: mol_type = other DNA
ctcaccaggccccaccagagtgcat

SEQ ID NO: 2335 - DNA, 25 bp, synthetic construct
  source 1..25: mol_type = other DNA
actcaccaggccccaccagagtgca

SEQ ID NO: 2336 - DNA, 25 bp, synthetic construct
  source 1..25: mol_type = other DNA
aactcaccaggccccaccagagtgc

SEQ ID NO: 2337 - DNA, 25 bp, synthetic construct
  source 1..25: mol_type = other DNA
caactcaccaggccccaccagagtg

SEQ ID NO: 2338 - DNA, 25 bp, synthetic construct
  source 1..25: mol_type = other DNA
acaactcaccaggccccaccagagt

SEQ ID NO: 2339 - DNA, 25 bp, synthetic construct
  source 1..25: mol_type = other DNA
cacaactcaccaggccccaccagag

SEQ ID NO: 2340 - DNA, 25 bp, synthetic construct
  source 1..25: mol_type = other DNA
ccacaactcaccaggccccaccaga

SEQ ID NO: 2341 - DNA, 25 bp, synthetic construct
  source 1..25: mol_type = other DNA
accacaactcaccaggccccaccag

SEQ ID NO: 2342 - DNA, 25 bp, synthetic construct
  source 1..25: mol_type = other DNA
gaccacaactcaccaggccccacca

SEQ ID NO: 2343 - DNA, 25 bp, synthetic construct
  source 1..25: mol_type = other DNA
tgaccacaactcaccaggccccacc

SEQ ID NO: 2344 - DNA, 25 bp, synthetic construct
  source 1..25: mol_type = other DNA
atgaccacaactcaccaggccccac

SEQ ID NO: 2345 - DNA, 25 bp, synthetic construct
  source 1..25: mol_type = other DNA
aatgaccacaactcaccaggcccca

SEQ ID NO: 2346 - DNA, 25 bp, synthetic construct
  source 1..25: mol_type = other DNA
caatgaccacaactcaccaggcccc

SEQ ID NO: 2347 - DNA, 25 bp, synthetic construct
  source 1..25: mol_type = other DNA
acaatgaccacaactcaccaggccc

SEQ ID NO: 2348 - DNA, 25 bp, synthetic construct
  source 1..25: mol_type = other DNA
cacaatgaccacaactcaccaggcc

SEQ ID NO: 2349 - DNA, 25 bp, synthetic construct
  source 1..25: mol_type = other DNA
ccacaatgaccacaactcaccaggc

SEQ ID NO: 2350 - DNA, 25 bp, synthetic construct
  source 1..25: mol_type = other DNA
accacaatgaccacaactcaccagg

SEQ ID NO: 2351 - DNA, 25 bp, synthetic construct
  source 1..25: mol_type = other DNA
aaccacaatgaccacaactcaccag

SEQ ID NO: 2352 - DNA, 25 bp, synthetic construct
  source 1..25: mol_type = other DNA
aaaccacaatgaccacaactcacca

SEQ ID NO: 2353 - DNA, 25 bp, synthetic construct
  source 1..25: mol_type = other DNA
aaaaccacaatgaccacaactcacc

SEQ ID NO: 2354 - DNA, 25 bp, synthetic construct
  source 1..25: mol_type = other DNA
gaaaaccacaatgaccacaactcac

SEQ ID NO: 2355 - DNA, 25 bp, synthetic construct
  source 1..25: mol_type = other DNA
ggaaaaccacaatgaccacaactca

SEQ ID NO: 2356 - DNA, 25 bp, synthetic construct
  source 1..25: mol_type = other DNA
gggaaaaccacaatgaccacaactc

SEQ ID NO: 2357 - DNA, 25 bp, synthetic construct
  source 1..25: mol_type = other DNA
agggaaaaccacaatgaccacaact

SEQ ID NO: 2358 - DNA, 25 bp, synthetic construct
  source 1..25: mol_type = other DNA
aagggaaaaccacaatgaccacaac

SEQ ID NO: 2359 - DNA, 25 bp, synthetic construct
  source 1..25: mol_type = other DNA
aaagggaaaaccacaatgaccacaa

SEQ ID NO: 2360 - DNA, 25 bp, synthetic construct
  source 1..25: mol_type = other DNA
gaaagggaaaaccacaatgaccaca

SEQ ID NO: 2361 - DNA, 25 bp, synthetic construct
  source 1..25: mol_type = other DNA
ggaaagggaaaaccacaatgaccac

SEQ ID NO: 2362 - DNA, 25 bp, synthetic construct
  source 1..25: mol_type = other DNA
gggaaagggaaaaccacaatgacca

SEQ ID NO: 2363 - DNA, 25 bp, synthetic construct
  source 1..25: mol_type = other DNA
agggaaagggaaaaccacaatgacc

SEQ ID NO: 2364 - DNA, 25 bp, synthetic construct
  source 1..25: mol_type = other DNA
cagggaaagggaaaaccacaatgac

SEQ ID NO: 2365 - DNA, 25 bp, synthetic construct
  source 1..25: mol_type = other DNA
gcagggaaagggaaaaccacaatga

SEQ ID NO: 2366 - DNA, 25 bp, synthetic construct
  source 1..25: mol_type = other DNA
agcagggaaagggaaaaccacaatg

SEQ ID NO: 2367 - DNA, 25 bp, synthetic construct
  source 1..25: mol_type = other DNA
cagcagggaaagggaaaaccacaat

SEQ ID NO: 2368 - DNA, 25 bp, synthetic construct
  source 1..25: mol_type = other DNA
tcagcagggaaagggaaaaccacaa

SEQ ID NO: 2369 - DNA, 25 bp, synthetic construct
  source 1..25: mol_type = other DNA
atcagcagggaaagggaaaaccaca

SEQ ID NO: 2370 - DNA, 25 bp, synthetic construct
  source 1..25: mol_type = other DNA
tatcagcagggaaagggaaaaccac

SEQ ID NO: 2371 - DNA, 25 bp, synthetic construct
  source 1..25: mol_type = other DNA
gtatcagcagggaaagggaaaacca

SEQ ID NO: 2372 - DNA, 25 bp, synthetic construct
  source 1..25: mol_type = other DNA
tgtatcagcagggaaagggaaaacc

SEQ ID NO: 2373 - DNA, 25 bp, synthetic construct
  source 1..25: mol_type = other DNA
gtgtatcagcagggaaagggaaaac

SEQ ID NO: 2374 - DNA, 25 bp, synthetic construct
  source 1..25: mol_type = other DNA
ggtgtatcagcagggaaagggaaaa

SEQ ID NO: 2375 - DNA, 25 bp, synthetic construct
  source 1..25: mol_type = other DNA
gggtgtatcagcagggaaagggaaa

SEQ ID NO: 2376 - DNA, 25 bp, synthetic construct
  source 1..25: mol_type = other DNA
ggggtgtatcagcagggaaagggaa

SEQ ID NO: 2377 - DNA, 25 bp, synthetic construct
  source 1..25: mol_type = other DNA
aggggtgtatcagcagggaaaggga

SEQ ID NO: 2378 - DNA, 25 bp, synthetic construct
  source 1..25: mol_type = other DNA
caggggtgtatcagcagggaaaggg

SEQ ID NO: 2379 - DNA, 25 bp, synthetic construct
  source 1..25: mol_type = other DNA
acaggggtgtatcagcagggaaagg

SEQ ID NO: 2380 - DNA, 25 bp, synthetic construct
  source 1..25: mol_type = other DNA
gacaggggtgtatcagcagggaaag

SEQ ID NO: 2381 - DNA, 25 bp, synthetic construct
  source 1..25: mol_type = other DNA
ggacaggggtgtatcagcagggaaa

SEQ ID NO: 2382 - DNA, 25 bp, synthetic construct
  source 1..25: mol_type = other DNA
gggacaggggtgtatcagcagggaa

SEQ ID NO: 2383 - DNA, 25 bp, synthetic construct
  source 1..25: mol_type = other DNA
agggacaggggtgtatcagcaggga

SEQ ID NO: 2384 - DNA, 25 bp, synthetic construct
  source 1..25: mol_type = other DNA
cagggacaggggtgtatcagcaggg

SEQ ID NO: 2385 - DNA, 25 bp, synthetic construct
  source 1..25: mol_type = other DNA
acagggacaggggtgtatcagcagg

SEQ ID NO: 2386 - DNA, 25 bp, synthetic construct
  source 1..25: mol_type = other DNA
cacagggacaggggtgtatcagcag

SEQ ID NO: 2387 - DNA, 25 bp, synthetic construct
  source 1..25: mol_type = other DNA
gcacagggacaggggtgtatcagca

SEQ ID NO: 2388 - DNA, 25 bp, synthetic construct
  source 1..25: mol_type = other DNA
agcacagggacaggggtgtatcagc

SEQ ID NO: 2389 - DNA, 25 bp, synthetic construct
  source 1..25: mol_type = other DNA
cagcacagggacaggggtgtatcag

SEQ ID NO: 2390 - DNA, 25 bp, synthetic construct
  source 1..25: mol_type = other DNA
ccagcacagggacaggggtgtatca

SEQ ID NO: 2391 - DNA, 25 bp, synthetic construct
  source 1..25: mol_type = other DNA
cccagcacagggacaggggtgtatc

SEQ ID NO: 2392 - DNA, 25 bp, synthetic construct
  source 1..25: mol_type = other DNA
tcccagcacagggacaggggtgtat

SEQ ID NO: 2393 - DNA, 25 bp, synthetic construct
  source 1..25: mol_type = other DNA
gtcccagcacagggacaggggtgta

SEQ ID NO: 2394 - DNA, 25 bp, synthetic construct
  source 1..25: mol_type = other DNA
ggtcccagcacagggacaggggtgt

SEQ ID NO: 2395 - DNA, 25 bp, synthetic construct
  source 1..25: mol_type = other DNA
tggtcccagcacagggacaggggtg

SEQ ID NO: 2396 - DNA, 25 bp, synthetic construct
  source 1..25: mol_type = other DNA
ctggtcccagcacagggacaggggt

SEQ ID NO: 2397 - DNA, 25 bp, synthetic construct
  source 1..25: mol_type = other DNA
cctggtcccagcacagggacagggg

SEQ ID NO: 2398 - DNA, 25 bp, synthetic construct
  source 1..25: mol_type = other DNA
gcctggtcccagcacagggacaggg

SEQ ID NO: 2399 - DNA, 25 bp, synthetic construct
  source 1..25: mol_type = other DNA
agcctggtcccagcacagggacagg

SEQ ID NO: 2400 - DNA, 25 bp, synthetic construct
  source 1..25: mol_type = other DNA
gagcctggtcccagcacagggacag

SEQ ID NO: 2401 - DNA, 25 bp, synthetic construct
  source 1..25: mol_type = other DNA
agagcctggtcccagcacagggaca

SEQ ID NO: 2402 - DNA, 25 bp, synthetic construct
  source 1..25: mol_type = other DNA
gagagcctggtcccagcacagggac

SEQ ID NO: 2403 - DNA, 25 bp, synthetic construct
  source 1..25: mol_type = other DNA
tgagagcctggtcccagcacaggga

SEQ ID NO: 2404 - DNA, 25 bp, synthetic construct
  source 1..25: mol_type = other DNA
gtgagagcctggtcccagcacaggg

SEQ ID NO: 2405 - DNA, 25 bp, synthetic construct
  source 1..25: mol_type = other DNA
agtgagagcctggtcccagcacagg

SEQ ID NO: 2406 - DNA, 25 bp, synthetic construct
  source 1..25: mol_type = other DNA
cagtgagagcctggtcccagcacag

SEQ ID NO: 2407 - DNA, 25 bp, synthetic construct
  source 1..25: mol_type = other DNA
ccagtgagagcctggtcccagcaca

SEQ ID NO: 2408 - DNA, 25 bp, synthetic construct
  source 1..25: mol_type = other DNA
gccagtgagagcctggtcccagcac

SEQ ID NO: 2409 - DNA, 25 bp, synthetic construct
  source 1..25: mol_type = other DNA
agccagtgagagcctggtcccagca

SEQ ID NO: 2410 - DNA, 25 bp, synthetic construct
  source 1..25: mol_type = other DNA
cagccagtgagagcctggtcccagc

SEQ ID NO: 2411 - DNA, 25 bp, synthetic construct
  source 1..25: mol_type = other DNA
tcagccagtgagagcctggtcccag

SEQ ID NO: 2412 - DNA, 25 bp, synthetic construct
  source 1..25: mol_type = other DNA
ctcagccagtgagagcctggtccca

SEQ ID NO: 2413 - DNA, 25 bp, synthetic construct
  source 1..25: mol_type = other DNA
gctcagccagtgagagcctggtccc

SEQ ID NO: 2414 - DNA, 25 bp, synthetic construct
  source 1..25: mol_type = other DNA
ggctcagccagtgagagcctggtcc

SEQ ID NO: 2415 - DNA, 25 bp, synthetic construct
  source 1..25: mol_type = other DNA
aggctcagccagtgagagcctggtc

SEQ ID NO: 2416 - DNA, 25 bp, synthetic construct
  source 1..25: mol_type = other DNA
caggctcagccagtgagagcctggt

SEQ ID NO: 2417 - DNA, 25 bp, synthetic construct
  source 1..25: mol_type = other DNA
gcaggctcagccagtgagagcctgg

SEQ ID NO: 2418 - DNA, 25 bp, synthetic construct
  source 1..25: mol_type = other DNA
agcaggctcagccagtgagagcctg

SEQ ID NO: 2419 - DNA, 25 bp, synthetic construct
  source 1..25: mol_type = other DNA
gagcaggctcagccagtgagagcct

SEQ ID NO: 2420 - DNA, 25 bp, synthetic construct
  source 1..25: mol_type = other DNA
ggagcaggctcagccagtgagagcc

SEQ ID NO: 2421 - DNA, 25 bp, synthetic construct
  source 1..25: mol_type = other DNA
tggagcaggctcagccagtgagagc

SEQ ID NO: 2422 - DNA, 25 bp, synthetic construct
  source 1..25: mol_type = other DNA
atggagcaggctcagccagtgagag

SEQ ID NO: 2423 - DNA, 25 bp, synthetic construct
  source 1..25: mol_type = other DNA
tatggagcaggctcagccagtgaga

SEQ ID NO: 2424 - DNA, 25 bp, synthetic construct
  source 1..25: mol_type = other DNA
gtatggagcaggctcagccagtgag

SEQ ID NO: 2425 - DNA, 25 bp, synthetic construct
  source 1..25: mol_type = other DNA
tgtatggagcaggctcagccagtga

SEQ ID NO: 2426 - DNA, 25 bp, synthetic construct
  source 1..25: mol_type = other DNA
atgtatggagcaggctcagccagtg

SEQ ID NO: 2427 - DNA, 25 bp, synthetic construct
  source 1..25: mol_type = other DNA
gatgtatggagcaggctcagccagt

SEQ ID NO: 2428 - DNA, 25 bp, synthetic construct
  source 1..25: mol_type = other DNA
agatgtatggagcaggctcagccag

SEQ ID NO: 2429 - DNA, 25 bp, synthetic construct
  source 1..25: mol_type = other DNA
gagatgtatggagcaggctcagcca

SEQ ID NO: 2430 - DNA, 25 bp, synthetic construct
  source 1..25: mol_type = other DNA
agagatgtatggagcaggctcagcc

SEQ ID NO: 2431 - DNA, 25 bp, synthetic construct
  source 1..25: mol_type = other DNA
aagagatgtatggagcaggctcagc

SEQ ID NO: 2432 - DNA, 25 bp, synthetic construct
  source 1..25: mol_type = other DNA
aaagagatgtatggagcaggctcag

SEQ ID NO: 2433 - DNA, 25 bp, synthetic construct
  source 1..25: mol_type = other DNA
caaagagatgtatggagcaggctca

SEQ ID NO: 2434 - DNA, 25 bp, synthetic construct
  source 1..25: mol_type = other DNA
ccaaagagatgtatggagcaggctc

SEQ ID NO: 2435 - DNA, 25 bp, synthetic construct
  source 1..25: mol_type = other DNA
cccaaagagatgtatggagcaggct

SEQ ID NO: 2436 - DNA, 25 bp, synthetic construct
  source 1..25: mol_type = other DNA
ccccaaagagatgtatggagcaggc

SEQ ID NO: 2437 - DNA, 25 bp, synthetic construct
  source 1..25: mol_type = other DNA
gccccaaagagatgtatggagcagg

SEQ ID NO: 2438 - DNA, 25 bp, synthetic construct
  source 1..25: mol_type = other DNA
ggccccaaagagatgtatggagcag

SEQ ID NO: 2439 - DNA, 25 bp, synthetic construct
  source 1..25: mol_type = other DNA
tggccccaaagagatgtatggagca

SEQ ID NO: 2440 - DNA, 25 bp, synthetic construct
  source 1..25: mol_type = other DNA
gtggccccaaagagatgtatggagc

SEQ ID NO: 2441 - DNA, 25 bp, synthetic construct
  source 1..25: mol_type = other DNA
ggtggccccaaagagatgtatggag

SEQ ID NO: 2442 - DNA, 25 bp, synthetic construct
  source 1..25: mol_type = other DNA
aggtggccccaaagagatgtatgga

SEQ ID NO: 2443 - DNA, 25 bp, synthetic construct
  source 1..25: mol_type = other DNA
caggtggccccaaagagatgtatgg

SEQ ID NO: 2444 - DNA, 25 bp, synthetic construct
  source 1..25: mol_type = other DNA
gcaggtggccccaaagagatgtatg

SEQ ID NO: 2445 - DNA, 25 bp, synthetic construct
  source 1..25: mol_type = other DNA
agcaggtggccccaaagagatgtat

SEQ ID NO: 2446 - DNA, 25 bp, synthetic construct
  source 1..25: mol_type = other DNA
cagcaggtggccccaaagagatgta

SEQ ID NO: 2447 - DNA, 25 bp, synthetic construct
  source 1..25: mol_type = other DNA
ccagcaggtggccccaaagagatgt

SEQ ID NO: 2448 - DNA, 25 bp, synthetic construct
  source 1..25: mol_type = other DNA
gccagcaggtggccccaaagagatg

SEQ ID NO: 2449 - DNA, 25 bp, synthetic construct
  source 1..25: mol_type = other DNA
agccagcaggtggccccaaagagat

SEQ ID NO: 2450 - DNA, 25 bp, synthetic construct
  source 1..25: mol_type = other DNA
cagccagcaggtggccccaaagaga

SEQ ID NO: 2451 - DNA, 25 bp, synthetic construct
  source 1..25: mol_type = other DNA
gcagccagcaggtggccccaaagag

SEQ ID NO: 2452 - DNA, 25 bp, synthetic construct
  source 1..25: mol_type = other DNA
ggcagccagcaggtggccccaaaga

SEQ ID NO: 2453 - DNA, 25 bp, synthetic construct
  source 1..25: mol_type = other DNA
gggcagccagcaggtggccccaaag

SEQ ID NO: 2454 - DNA, 25 bp, synthetic construct
  source 1..25: mol_type = other DNA
cgggcagccagcaggtggccccaaa

SEQ ID NO: 2455 - DNA, 25 bp, synthetic construct
  source 1..25: mol_type = other DNA
acgggcagccagcaggtggccccaa

SEQ ID NO: 2456 - DNA, 25 bp, synthetic construct
  source 1..25: mol_type = other DNA
cacgggcagccagcaggtggcccca

SEQ ID NO: 2457 - DNA, 25 bp, synthetic construct
  source 1..25: mol_type = other DNA
ccacgggcagccagcaggtggcccc

SEQ ID NO: 2458 - DNA, 25 bp, synthetic construct
  source 1..25: mol_type = other DNA
accacgggcagccagcaggtggccc

SEQ ID NO: 2459 - DNA, 25 bp, synthetic construct
  source 1..25: mol_type = other DNA
gaccacgggcagccagcaggtggcc

SEQ ID NO: 2460 - DNA, 25 bp, synthetic construct
  source 1..25: mol_type = other DNA
tgaccacgggcagccagcaggtggc

SEQ ID NO: 2461 - DNA, 25 bp, synthetic construct
  source 1..25: mol_type = other DNA
atgaccacgggcagccagcaggtgg

SEQ ID NO: 2462 - DNA, 25 bp, synthetic construct
  source 1..25: mol_type = other DNA
catgaccacgggcagccagcaggtg

SEQ ID NO: 2463 - DNA, 25 bp, synthetic construct
  source 1..25: mol_type = other DNA
tcatgaccacgggcagccagcaggt

SEQ ID NO: 2464 - DNA, 25 bp, synthetic construct
  source 1..25: mol_type = other DNA
atcatgaccacgggcagccagcagg

SEQ ID NO: 2465 - DNA, 25 bp, synthetic construct
  source 1..25: mol_type = other DNA
catcatgaccacgggcagccagcag

SEQ ID NO: 2466 - DNA, 25 bp, synthetic construct
  source 1..25: mol_type = other DNA
ccatcatgaccacgggcagccagca

SEQ ID NO: 2467 - DNA, 25 bp, synthetic construct
  source 1..25: mol_type = other DNA
gccatcatgaccacgggcagccagc

SEQ ID NO: 2468 - DNA, 25 bp, synthetic construct
  source 1..25: mol_type = other DNA
agccatcatgaccacgggcagccag

SEQ ID NO: 2469 - DNA, 25 bp, synthetic construct
  source 1..25: mol_type = other DNA
aagccatcatgaccacgggcagcca

SEQ ID NO: 2470 - DNA, 25 bp, synthetic construct
  source 1..25: mol_type = other DNA
caagccatcatgaccacgggcagcc

SEQ ID NO: 2471 - DNA, 25 bp, synthetic construct
  source 1..25: mol_type = other DNA
acaagccatcatgaccacgggcagc

SEQ ID NO: 2472 - DNA, 25 bp, synthetic construct
  source 1..25: mol_type = other DNA
cacaagccatcatgaccacgggcag

SEQ ID NO: 2473 - DNA, 25 bp, synthetic construct
  source 1..25: mol_type = other DNA
ccacaagccatcatgaccacgggca

SEQ ID NO: 2474 - DNA, 25 bp, synthetic construct
  source 1..25: mol_type = other DNA
accacaagccatcatgaccacgggc

SEQ ID NO: 2475 - DNA, 25 bp, synthetic construct
  source 1..25: mol_type = other DNA
gaccacaagccatcatgaccacggg

SEQ ID NO: 2476 - DNA, 25 bp, synthetic construct
  source 1..25: mol_type = other DNA
cgaccacaagccatcatgaccacgg

SEQ ID NO: 2477 - DNA, 25 bp, synthetic construct
  source 1..25: mol_type = other DNA
tcgaccacaagccatcatgaccacg

SEQ ID NO: 2478 - DNA, 25 bp, synthetic construct
  source 1..25: mol_type = other DNA
ctcgaccacaagccatcatgaccac

SEQ ID NO: 2479 - DNA, 25 bp, synthetic construct
  source 1..25: mol_type = other DNA
cctcgaccacaagccatcatgacca

SEQ ID NO: 2480 - DNA, 25 bp, synthetic construct
  source 1..25: mol_type = other DNA
gcctcgaccacaagccatcatgacc

SEQ ID NO: 2481 - DNA, 25 bp, synthetic construct
  source 1..25: mol_type = other DNA
cgcctcgaccacaagccatcatgac

SEQ ID NO: 2482 - DNA, 25 bp, synthetic construct
  source 1..25: mol_type = other DNA
ccgcctcgaccacaagccatcatga

SEQ ID NO: 2483 - DNA, 25 bp, synthetic construct
  source 1..25: mol_type = other DNA
cccgcctcgaccacaagccatcatg

SEQ ID NO: 2484 - DNA, 25 bp, synthetic construct
  source 1..25: mol_type = other DNA
ccccgcctcgaccacaagccatcat

SEQ ID NO: 2485 - DNA, 25 bp, synthetic construct
  source 1..25: mol_type = other DNA
accccgcctcgaccacaagccatca

SEQ ID NO: 2486 - DNA, 25 bp, synthetic construct
  source 1..25: mol_type = other DNA
caccccgcctcgaccacaagccatc

SEQ ID NO: 2487 - DNA, 25 bp, synthetic construct
  source 1..25: mol_type = other DNA
ccaccccgcctcgaccacaagccat

SEQ ID NO: 2488 - DNA, 25 bp, synthetic construct
  source 1..25: mol_type = other DNA
accaccccgcctcgaccacaagcca

SEQ ID NO: 2489 - DNA, 25 bp, synthetic construct
  source 1..25: mol_type = other DNA
caccaccccgcctcgaccacaagcc

SEQ ID NO: 2490 - DNA, 25 bp, synthetic construct
  source 1..25: mol_type = other DNA
ccaccaccccgcctcgaccacaagc

SEQ ID NO: 2491 - DNA, 25 bp, synthetic construct
  source 1..25: mol_type = other DNA
accaccaccccgcctcgaccacaag

SEQ ID NO: 2492 - DNA, 25 bp, synthetic construct
  source 1..25: mol_type = other DNA
aaccaccaccccgcctcgaccacaa

SEQ ID NO: 2493 - DNA, 25 bp, synthetic construct
  source 1..25: mol_type = other DNA
caaccaccaccccgcctcgaccaca

SEQ ID NO: 2494 - DNA, 25 bp, synthetic construct
  source 1..25: mol_type = other DNA
gcaaccaccaccccgcctcgaccac

SEQ ID NO: 2495 - DNA, 25 bp, synthetic construct
  source 1..25: mol_type = other DNA
ggcaaccaccaccccgcctcgacca

SEQ ID NO: 2496 - DNA, 25 bp, synthetic construct
  source 1..25: mol_type = other DNA
tggcaaccaccaccccgcctcgacc

SEQ ID NO: 2497 - DNA, 25 bp, synthetic construct
  source 1..25: mol_type = other DNA
ttggcaaccaccaccccgcctcgac

SEQ ID NO: 2498 - DNA, 25 bp, synthetic construct
  source 1..25: mol_type = other DNA
cttggcaaccaccaccccgcctcga

SEQ ID NO: 2499 - DNA, 25 bp, synthetic construct
  source 1..25: mol_type = other DNA
gcttggcaaccaccaccccgcctcg

SEQ ID NO: 2500 - DNA, 25 bp, synthetic construct
  source 1..25: mol_type = other DNA
agcttggcaaccaccaccccgcctc

SEQ ID NO: 2501 - DNA, 25 bp, synthetic construct
  source 1..25: mol_type = other DNA
cagcttggcaaccaccaccccgcct

SEQ ID NO: 2502 - DNA, 25 bp, synthetic construct
  source 1..25: mol_type = other DNA
ccagcttggcaaccaccaccccgcc

SEQ ID NO: 2503 - DNA, 25 bp, synthetic construct
  source 1..25: mol_type = other DNA
gccagcttggcaaccaccaccccgc

SEQ ID NO: 2504 - DNA, 25 bp, synthetic construct
  source 1..25: mol_type = other DNA
cgccagcttggcaaccaccaccccg

SEQ ID NO: 2505 - DNA, 25 bp, synthetic construct
  source 1..25: mol_type = other DNA
ccgccagcttggcaaccaccacccc

SEQ ID NO: 2506 - DNA, 25 bp, synthetic construct
  source 1..25: mol_type = other DNA
cccgccagcttggcaaccaccaccc

SEQ ID NO: 2507 - DNA, 25 bp, synthetic construct
  source 1..25: mol_type = other DNA
ccccgccagcttggcaaccaccacc

SEQ ID NO: 2508 - DNA, 25 bp, synthetic construct
  source 1..25: mol_type = other DNA
cccccgccagcttggcaaccaccac

SEQ ID NO: 2509 - DNA, 25 bp, synthetic construct
  source 1..25: mol_type = other DNA
tcccccgccagcttggcaaccacca

SEQ ID NO: 2510 - DNA, 25 bp, synthetic construct
  source 1..25: mol_type = other DNA
ctcccccgccagcttggcaaccacc

SEQ ID NO: 2511 - DNA, 25 bp, synthetic construct
  source 1..25: mol_type = other DNA
actcccccgccagcttggcaaccac

SEQ ID NO: 2512 - DNA, 25 bp, synthetic construct
  source 1..25: mol_type = other DNA
cactcccccgccagcttggcaacca

SEQ ID NO: 2513 - DNA, 25 bp, synthetic construct
  source 1..25: mol_type = other DNA
ccactcccccgccagcttggcaacc

SEQ ID NO: 2514 - DNA, 25 bp, synthetic construct
  source 1..25: mol_type = other DNA
cccactcccccgccagcttggcaac

SEQ ID NO: 2515 - DNA, 25 bp, synthetic construct
  source 1..25: mol_type = other DNA
acccactcccccgccagcttggcaa

SEQ ID NO: 2516 - DNA, 25 bp, synthetic construct
  source 1..25: mol_type = other DNA
cacccactcccccgccagcttggca

SEQ ID NO: 2517 - DNA, 25 bp, synthetic construct
  source 1..25: mol_type = other DNA
ccacccactcccccgccagcttggc

SEQ ID NO: 2518 - DNA, 25 bp, synthetic construct
  source 1..25: mol_type = other DNA
cccacccactcccccgccagcttgg

SEQ ID NO: 2519 - DNA, 25 bp, synthetic construct
  source 1..25: mol_type = other DNA
ccccacccactcccccgccagcttg

SEQ ID NO: 2520 - DNA, 25 bp, synthetic construct
  source 1..25: mol_type = other DNA
tccccacccactcccccgccagctt

SEQ ID NO: 2521 - DNA, 25 bp, synthetic construct
  source 1..25: mol_type = other DNA
ctccccacccactcccccgccagct

SEQ ID NO: 2522 - DNA, 25 bp, synthetic construct
  source 1..25: mol_type = other DNA
cctccccacccactcccccgccagc

SEQ ID NO: 2523 - DNA, 25 bp, synthetic construct
  source 1..25: mol_type = other DNA
ccctccccacccactcccccgccag

SEQ ID NO: 2524 - DNA, 25 bp, synthetic construct
  source 1..25: mol_type = other DNA
gccctccccacccactcccccgcca

SEQ ID NO: 2525 - DNA, 25 bp, synthetic construct
  source 1..25: mol_type = other DNA
agccctccccacccactcccccgcc

SEQ ID NO: 2526 - DNA, 25 bp, synthetic construct
  source 1..25: mol_type = other DNA
cagccctccccacccactcccccgc

SEQ ID NO: 2527 - DNA, 25 bp, synthetic construct
  source 1..25: mol_type = other DNA
ccagccctccccacccactcccccg

SEQ ID NO: 2528 - DNA, 25 bp, synthetic construct
  source 1..25: mol_type = other DNA
cccagccctccccacccactccccc

SEQ ID NO: 2529 - DNA, 25 bp, synthetic construct
  source 1..25: mol_type = other DNA
gcccagccctccccacccactcccc

SEQ ID NO: 2530 - DNA, 25 bp, Homo sapiens
  source 1..25: mol_type = genomic DNA
gtgatgatggtggtggtggtggtga

SEQ ID NO: 2531 - DNA, 25 bp, Homo sapiens
  source 1..25: mol_type = genomic DNA
tgatgatggtggtggtggtggtgat

SEQ ID NO: 2532 - DNA, 25 bp, Homo sapiens
  source 1..25: mol_type = genomic DNA
gatgatggtggtggtggtggtgatg

SEQ ID NO: 2533 - DNA, 25 bp, Homo sapiens
  source 1..25: mol_type = genomic DNA
atgatggtggtggtggtggtgatgg

SEQ ID NO: 2534 - DNA, 25 bp, Homo sapiens
  source 1..25: mol_type = genomic DNA
tgatggtggtggtggtggtgatggt

SEQ ID NO: 2535 - DNA, 25 bp, Homo sapiens
  source 1..25: mol_type = genomic DNA
gatggtggtggtggtggtgatggtg

SEQ ID NO: 2536 - DNA, 25 bp, Homo sapiens
  source 1..25: mol_type = genomic DNA
atggtggtggtggtggtgatggtga

SEQ ID NO: 2537 - DNA, 25 bp, Homo sapiens
  source 1..25: mol_type = genomic DNA
tggtggtggtggtggtgatggtgat

SEQ ID NO: 2538 - DNA, 25 bp, Homo sapiens
  source 1..25: mol_type = genomic DNA
ggtggtggtggtggtgatggtgatg

SEQ ID NO: 2539 - DNA, 25 bp, Homo sapiens
  source 1..25: mol_type = genomic DNA
gtggtggtggtggtgatggtgatgg

SEQ ID NO: 2540 - DNA, 25 bp, Homo sapiens
  source 1..25: mol_type = genomic DNA
tggtggtggtggtgatggtgatggt

SEQ ID NO: 2541 - DNA, 25 bp, Homo sapiens
  source 1..25: mol_type = genomic DNA
ggtggtggtggtgatggtgatggtg

SEQ ID NO: 2542 - DNA, 25 bp, Homo sapiens
  source 1..25: mol_type = genomic DNA
gtggtggtggtgatggtgatggtgg

SEQ ID NO: 2543 - DNA, 25 bp, Homo sapiens
  source 1..25: mol_type = genomic DNA
tggtggtggtgatggtgatggtggt

SEQ ID NO: 2544 - DNA, 25 bp, Homo sapiens
  source 1..25: mol_type = genomic DNA
ggtggtggtgatggtgatggtggtg

SEQ ID NO: 2545 - DNA, 25 bp, Homo sapiens
  source 1..25: mol_type = genomic DNA
gtggtggtgatggtgatggtggtga

SEQ ID NO: 2546 - DNA, 25 bp, Homo sapiens
  source 1..25: mol_type = genomic DNA
tggtggtgatggtgatggtggtgat

SEQ ID NO: 2547 - DNA, 25 bp, Homo sapiens
  source 1..25: mol_type = genomic DNA
ggtggtgatggtgatggtggtgatg

SEQ ID NO: 2548 - DNA, 25 bp, Homo sapiens
  source 1..25: mol_type = genomic DNA
gtggtgatggtgatggtggtgatgg

SEQ ID NO: 2549 - DNA, 25 bp, Homo sapiens
  source 1..25: mol_type = genomic DNA
tggtgatggtgatggtggtgatggt

SEQ ID NO: 2550 - DNA, 25 bp, Homo sapiens
  source 1..25: mol_type = genomic DNA
ggtgatggtgatggtggtgatggtg

SEQ ID NO: 2551 - DNA, 25 bp, Homo sapiens
  source 1..25: mol_type = genomic DNA
gtgatggtgatggtggtgatggtga

SEQ ID NO: 2552 - DNA, 25 bp, Homo sapiens
  source 1..25: mol_type = genomic DNA
tgatggtgatggtggtgatggtgat

SEQ ID NO: 2553 - DNA, 25 bp, Homo sapiens
  source 1..25: mol_type = genomic DNA
gatggtgatggtggtgatggtgatg

SEQ ID NO: 2554 - DNA, 25 bp, Homo sapiens
  source 1..25: mol_type = genomic DNA
atggtgatggtggtgatggtgatgg

SEQ ID NO: 2555 - DNA, 25 bp, Homo sapiens
  source 1..25: mol_type = genomic DNA
tggtgatggtggtgatggtgatggt

SEQ ID NO: 2556 - DNA, 25 bp, Homo sapiens
  source 1..25: mol_type = genomic DNA
ggtgatggtggtgatggtgatggtg

SEQ ID NO: 2557 - DNA, 25 bp, Homo sapiens
  source 1..25: mol_type = genomic DNA
gtgatggtggtgatggtgatggtgg

SEQ ID NO: 2558 - DNA, 25 bp, Homo sapiens
  source 1..25: mol_type = genomic DNA
tgatggtggtgatggtgatggtggt

SEQ ID NO: 2559 - DNA, 25 bp, Homo sapiens
  source 1..25: mol_type = genomic DNA
gatggtggtgatggtgatggtggtg

SEQ ID NO: 2560 - DNA, 25 bp, Homo sapiens
  source 1..25: mol_type = genomic DNA
atggtggtgatggtgatggtggtgg

SEQ ID NO: 2561 - DNA, 25 bp, Homo sapiens
  source 1..25: mol_type = genomic DNA
tggtggtgatggtgatggtggtggt

SEQ ID NO: 2562 - DNA, 25 bp, Homo sapiens
  source 1..25: mol_type = genomic DNA
ggtggtgatggtgatggtggtggtg

SEQ ID NO: 2563 - DNA, 25 bp, Homo sapiens
  source 1..25: mol_type = genomic DNA
gtggtgatggtgatggtggtggtgg

SEQ ID NO: 2564 - DNA, 25 bp, Homo sapiens
  source 1..25: mol_type = genomic DNA
tggtgatggtgatggtggtggtggt

SEQ ID NO: 2565 - DNA, 25 bp, Homo sapiens
  source 1..25: mol_type = genomic DNA
ggtgatggtgatggtggtggtggtg

SEQ ID NO: 2566 - DNA, 25 bp, Homo sapiens
  source 1..25: mol_type = genomic DNA
gtgatggtgatggtggtggtggtgg

SEQ ID NO: 2567 - DNA, 25 bp, Homo sapiens
  source 1..25: mol_type = genomic DNA
tgatggtgatggtggtggtggtggt

SEQ ID NO: 2568 - DNA, 25 bp, Homo sapiens
  source 1..25: mol_type = genomic DNA
gatggtgatggtggtggtggtggtg

SEQ ID NO: 2569 - DNA, 25 bp, Homo sapiens
  source 1..25: mol_type = genomic DNA
atggtgatggtggtggtggtggtgg

SEQ ID NO: 2570 - DNA, 25 bp, Homo sapiens
  source 1..25: mol_type = genomic DNA
tggtgatggtggtggtggtggtggt

SEQ ID NO: 2571 - DNA, 25 bp, Homo sapiens
  source 1..25: mol_type = genomic DNA
ggtgatggtggtggtggtggtggtg

SEQ ID NO: 2572 - DNA, 25 bp, Homo sapiens
  source 1..25: mol_type = genomic DNA
gtgatggtggtggtggtggtggtgg

SEQ ID NO: 2573 - DNA, 25 bp, Homo sapiens
  source 1..25: mol_type = genomic DNA
tgatggtggtggtggtggtggtggt

SEQ ID NO: 2574 - DNA, 25 bp, Homo sapiens
  source 1..25: mol_type = genomic DNA
gatggtggtggtggtggtggtggtg

SEQ ID NO: 2575 - DNA, 25 bp, Homo sapiens
  source 1..25: mol_type = genomic DNA
atggtggtggtggtggtggtggtga

SEQ ID NO: 2576 - DNA, 25 bp, Homo sapiens
  source 1..25: mol_type = genomic DNA
tggtggtggtggtggtggtggtgat

SEQ ID NO: 2577 - DNA, 25 bp, Homo sapiens
  source 1..25: mol_type = genomic DNA
ggtggtggtggtggtggtggtgatg

SEQ ID NO: 2578 - DNA, 25 bp, Homo sapiens
  source 1..25: mol_type = genomic DNA
gtggtggtggtggtggtggtgatgg

SEQ ID NO: 2579 - DNA, 25 bp, Homo sapiens
  source 1..25: mol_type = genomic DNA
tggtggtggtggtggtggtgatggt

SEQ ID NO: 2580 - DNA, 25 bp, Homo sapiens
  source 1..25: mol_type = genomic DNA
ggtggtggtggtggtggtgatggtg

SEQ ID NO: 2581 - DNA, 25 bp, Homo sapiens
  source 1..25: mol_type = genomic DNA
gtggtggtggtggtggtgatggtgg

SEQ ID NO: 2582 - DNA, 25 bp, Homo sapiens
  source 1..25: mol_type = genomic DNA
tggtggtggtggtggtgatggtggt

SEQ ID NO: 2583 - DNA, 25 bp, Homo sapiens
  source 1..25: mol_type = genomic DNA
ggtggtggtggtggtgatggtggtg

SEQ ID NO: 2584 - DNA, 25 bp, Homo sapiens
  source 1..25: mol_type = genomic DNA
gtggtggtggtggtgatggtggtgg

SEQ ID NO: 2585 - DNA, 25 bp, Homo sapiens
  source 1..25: mol_type = genomic DNA
tggtggtggtggtgatggtggtggt

SEQ ID NO: 2586 - DNA, 25 bp, Homo sapiens
  source 1..25: mol_type = genomic DNA
ggtggtggtggtgatggtggtggtg

SEQ ID NO: 2587 - DNA, 25 bp, Homo sapiens
  source 1..25: mol_type = genomic DNA
gtggtggtggtgatggtggtggtga

SEQ ID NO: 2588 - DNA, 25 bp, Homo sapiens
  source 1..25: mol_type = genomic DNA
tggtggtggtgatggtggtggtgat

SEQ ID NO: 2589 - DNA, 25 bp, Homo sapiens
  source 1..25: mol_type = genomic DNA
ggtggtggtgatggtggtggtgatg

SEQ ID NO: 2590 - DNA, 25 bp, Homo sapiens
  source 1..25: mol_type = genomic DNA
gtggtggtgatggtggtggtgatgg

SEQ ID NO: 2591 - DNA, 25 bp, Homo sapiens
  source 1..25: mol_type = genomic DNA
tggtggtgatggtggtggtgatggt

SEQ ID NO: 2592 - DNA, 25 bp, Homo sapiens
  source 1..25: mol_type = genomic DNA
ggtggtgatggtggtggtgatggtt

SEQ ID NO: 2593 - DNA, 25 bp, Homo sapiens
  source 1..25: mol_type = genomic DNA
gtggtgatggtggtggtgatggttt

SEQ ID NO: 2594 - DNA, 25 bp, Homo sapiens
  source 1..25: mol_type = genomic DNA
tggtgatggtggtggtgatggtttt

SEQ ID NO: 2595 - DNA, 25 bp, Homo sapiens
  source 1..25: mol_type = genomic DNA
ggtgatggtggtggtgatggttttg

SEQ ID NO: 2596 - DNA, 25 bp, Homo sapiens
  source 1..25: mol_type = genomic DNA
gtgatggtggtggtgatggttttgg

SEQ ID NO: 2597 - DNA, 25 bp, Homo sapiens
  source 1..25: mol_type = genomic DNA
tgatggtggtggtgatggttttggt

SEQ ID NO: 2598 - DNA, 25 bp, Homo sapiens
  source 1..25: mol_type = genomic DNA
gatggtggtggtgatggttttggtg

SEQ ID NO: 2599 - DNA, 25 bp, Homo sapiens
  source 1..25: mol_type = genomic DNA
atggtggtggtgatggttttggtgg

SEQ ID NO: 2600 - DNA, 25 bp, Homo sapiens
  source 1..25: mol_type = genomic DNA
tggtggtggtgatggttttggtggt

SEQ ID NO: 2601 - DNA, 25 bp, Homo sapiens
  source 1..25: mol_type = genomic DNA
ggtggtggtgatggttttggtggtg

SEQ ID NO: 2602 - DNA, 25 bp, Homo sapiens
  source 1..25: mol_type = genomic DNA
gtggtggtgatggttttggtggtgg

SEQ ID NO: 2603 - DNA, 25 bp, Homo sapiens
  source 1..25: mol_type = genomic DNA
tggtggtgatggttttggtggtggt

SEQ ID NO: 2604 - DNA, 25 bp, Homo sapiens
  source 1..25: mol_type = genomic DNA
ggtggtgatggttttggtggtggtg

SEQ ID NO: 2605 - DNA, 25 bp, Homo sapiens
  source 1..25: mol_type = genomic DNA
gtggtgatggttttggtggtggtga

SEQ ID NO: 2606 - DNA, 25 bp, Homo sapiens
  source 1..25: mol_type = genomic DNA
tggtgatggttttggtggtggtgat

SEQ ID NO: 2607 - DNA, 25 bp, Homo sapiens
  source 1..25: mol_type = genomic DNA
ggtgatggttttggtggtggtgatg

SEQ ID NO: 2608 - DNA, 25 bp, Homo sapiens
  source 1..25: mol_type = genomic DNA
gtgatggttttggtggtggtgatgg

SEQ ID NO: 2609 - DNA, 25 bp, Homo sapiens
  source 1..25: mol_type = genomic DNA
tgatggttttggtggtggtgatggt

SEQ ID NO: 2610 - DNA, 25 bp, Homo sapiens
  source 1..25: mol_type = genomic DNA
gatggttttggtggtggtgatggtg

SEQ ID NO: 2611 - DNA, 25 bp, Homo sapiens
  source 1..25: mol_type = genomic DNA
atggttttggtggtggtgatggtgg

SEQ ID NO: 2612 - DNA, 25 bp, Homo sapiens
  source 1..25: mol_type = genomic DNA
tggttttggtggtggtgatggtggt

SEQ ID NO: 2613 - DNA, 25 bp, Homo sapiens
  source 1..25: mol_type = genomic DNA
ggttttggtggtggtgatggtggtc

SEQ ID NO: 2614 - DNA, 25 bp, Homo sapiens
  source 1..25: mol_type = genomic DNA
gttttggtggtggtgatggtggtca

SEQ ID NO: 2615 - DNA, 25 bp, Homo sapiens
  source 1..25: mol_type = genomic DNA
ttttggtggtggtgatggtggtcat

SEQ ID NO: 2616 - DNA, 25 bp, Homo sapiens
  source 1..25: mol_type = genomic DNA
tttggtggtggtgatggtggtcatg

SEQ ID NO: 2617 - DNA, 25 bp, Homo sapiens
  source 1..25: mol_type = genomic DNA
ttggtggtggtgatggtggtcatgg

SEQ ID NO: 2618 - DNA, 25 bp, Homo sapiens
  source 1..25: mol_type = genomic DNA
tggtggtggtgatggtggtcatggt

SEQ ID NO: 2619 - DNA, 25 bp, Homo sapiens
  source 1..25: mol_type = genomic DNA
ggtggtggtgatggtggtcatggtg

SEQ ID NO: 2620 - DNA, 25 bp, Homo sapiens
  source 1..25: mol_type = genomic DNA
gtggtggtgatggtggtcatggtgt

SEQ ID NO: 2621 - DNA, 25 bp, Homo sapiens
  source 1..25: mol_type = genomic DNA
tggtggtgatggtggtcatggtgtt

SEQ ID NO: 2622 - DNA, 25 bp, Homo sapiens
  source 1..25: mol_type = genomic DNA
ggtggtgatggtggtcatggtgttg

SEQ ID NO: 2623 - DNA, 25 bp, Homo sapiens
  source 1..25: mol_type = genomic DNA
gtggtgatggtggtcatggtgttga

SEQ ID NO: 2624 - DNA, 25 bp, Homo sapiens
  source 1..25: mol_type = genomic DNA
tggtgatggtggtcatggtgttgat

SEQ ID NO: 2625 - DNA, 25 bp, Homo sapiens
  source 1..25: mol_type = genomic DNA
ggtgatggtggtcatggtgttgatg

SEQ ID NO: 2626 - DNA, 25 bp, Homo sapiens
  source 1..25: mol_type = genomic DNA
gtgatggtggtcatggtgttgatgt

SEQ ID NO: 2627 - DNA, 25 bp, Homo sapiens
  source 1..25: mol_type = genomic DNA
tgatggtggtcatggtgttgatgtg

SEQ ID NO: 2628 - DNA, 25 bp, Homo sapiens
  source 1..25: mol_type = genomic DNA
gatggtggtcatggtgttgatgtga

SEQ ID NO: 2629 - DNA, 25 bp, Homo sapiens
  source 1..25: mol_type = genomic DNA
atggtggtcatggtgttgatgtgat

SEQ ID NO: 2630 - DNA, 25 bp, Homo sapiens
  source 1..25: mol_type = genomic DNA
tggtggtcatggtgttgatgtgatg

SEQ ID NO: 2631 - DNA, 25 bp, Homo sapiens
  source 1..25: mol_type = genomic DNA
ggtggtcatggtgttgatgtgatgg

SEQ ID NO: 2632 - DNA, 25 bp, Homo sapiens
  source 1..25: mol_type = genomic DNA
gtggtcatggtgttgatgtgatggt

SEQ ID NO: 2633 - DNA, 25 bp, Homo sapiens
  source 1..25: mol_type = genomic DNA
tggtcatggtgttgatgtgatggtg

SEQ ID NO: 2634 - DNA, 25 bp, Homo sapiens
  source 1..25: mol_type = genomic DNA
ggtcatggtgttgatgtgatggtgg

SEQ ID NO: 2635 - DNA, 25 bp, Homo sapiens
  source 1..25: mol_type = genomic DNA
gtcatggtgttgatgtgatggtggt

SEQ ID NO: 2636 - DNA, 25 bp, Homo sapiens
  source 1..25: mol_type = genomic DNA
tcatggtgttgatgtgatggtggtg

SEQ ID NO: 2637 - DNA, 25 bp, Homo sapiens
  source 1..25: mol_type = genomic DNA
catggtgttgatgtgatggtggtgg

SEQ ID NO: 2638 - DNA, 25 bp, Homo sapiens
  source 1..25: mol_type = genomic DNA
atggtgttgatgtgatggtggtggt

SEQ ID NO: 2639 - DNA, 25 bp, Homo sapiens
  source 1..25: mol_type = genomic DNA
tggtgttgatgtgatggtggtggtg

SEQ ID NO: 2640 - DNA, 25 bp, Homo sapiens
  source 1..25: mol_type = genomic DNA
ggtgttgatgtgatggtggtggtgt

SEQ ID NO: 2641 - DNA, 25 bp, Homo sapiens
  source 1..25: mol_type = genomic DNA
gtgttgatgtgatggtggtggtgtt

SEQ ID NO: 2642 - DNA, 25 bp, Homo sapiens
  source 1..25: mol_type = genomic DNA
tgttgatgtgatggtggtggtgttg

SEQ ID NO: 2643 - DNA, 25 bp, Homo sapiens
  source 1..25: mol_type = genomic DNA
gttgatgtgatggtggtggtgttgg

SEQ ID NO: 2644 - DNA, 25 bp, Homo sapiens
  source 1..25: mol_type = genomic DNA
ttgatgtgatggtggtggtgttggt

SEQ ID NO: 2645 - DNA, 25 bp, Homo sapiens
  source 1..25: mol_type = genomic DNA
tgatgtgatggtggtggtgttggtg

SEQ ID NO: 2646 - DNA, 25 bp, Homo sapiens
  source 1..25: mol_type = genomic DNA
gatgtgatggtggtggtgttggtgg

SEQ ID NO: 2647 - DNA, 25 bp, Homo sapiens
  source 1..25: mol_type = genomic DNA
atgtgatggtggtggtgttggtggt

SEQ ID NO: 2648 - DNA, 25 bp, Homo sapiens
  source 1..25: mol_type = genomic DNA
tgtgatggtggtggtgttggtggtg

SEQ ID NO: 2649 - DNA, 25 bp, Homo sapiens
  source 1..25: mol_type = genomic DNA
gtgatggtggtggtgttggtggtgg

SEQ ID NO: 2650 - DNA, 25 bp, Homo sapiens
  source 1..25: mol_type = genomic DNA
tgatggtggtggtgttggtggtggt

SEQ ID NO: 2651 - DNA, 25 bp, Homo sapiens
  source 1..25: mol_type = genomic DNA
gatggtggtggtgttggtggtggtg

SEQ ID NO: 2652 - DNA, 25 bp, Homo sapiens
  source 1..25: mol_type = genomic DNA
atggtggtggtgttggtggtggtga

SEQ ID NO: 2653 - DNA, 25 bp, Homo sapiens
  source 1..25: mol_type = genomic DNA
tggtggtggtgttggtggtggtgat

SEQ ID NO: 2654 - DNA, 25 bp, Homo sapiens
  source 1..25: mol_type = genomic DNA
ggtggtggtgttggtggtggtgatg

SEQ ID NO: 2655 - DNA, 25 bp, Homo sapiens
  source 1..25: mol_type = genomic DNA
gtggtggtgttggtggtggtgatgg

SEQ ID NO: 2656 - DNA, 25 bp, Homo sapiens
  source 1..25: mol_type = genomic DNA
tggtggtgttggtggtggtgatggt

SEQ ID NO: 2657 - DNA, 25 bp, Homo sapiens
  source 1..25: mol_type = genomic DNA
ggtggtgttggtggtggtgatggtg

SEQ ID NO: 2658 - DNA, 25 bp, Homo sapiens
  source 1..25: mol_type = genomic DNA
gtggtgttggtggtggtgatggtga

SEQ ID NO: 2659 - DNA, 25 bp, Homo sapiens
  source 1..25: mol_type = genomic DNA
tggtgttggtggtggtgatggtgat

SEQ ID NO: 2660 - DNA, 25 bp, Homo sapiens
  source 1..25: mol_type = genomic DNA
ggtgttggtggtggtgatggtgatg

SEQ ID NO: 2661 - DNA, 25 bp, Homo sapiens
  source 1..25: mol_type = genomic DNA
gtgttggtggtggtgatggtgatgc

SEQ ID NO: 2662 - DNA, 25 bp, Homo sapiens
  source 1..25: mol_type = genomic DNA
tgttggtggtggtgatggtgatgct

SEQ ID NO: 2663 - DNA, 25 bp, Homo sapiens
  source 1..25: mol_type = genomic DNA
gttggtggtggtgatggtgatgctt

SEQ ID NO: 2664 - DNA, 25 bp, Homo sapiens
  source 1..25: mol_type = genomic DNA
ttggtggtggtgatggtgatgcttc

SEQ ID NO: 2665 - DNA, 25 bp, Homo sapiens
  source 1..25: mol_type = genomic DNA
tggtggtggtgatggtgatgcttct

SEQ ID NO: 2666 - DNA, 25 bp, Homo sapiens
  source 1..25: mol_type = genomic DNA
ggtggtggtgatggtgatgcttctg

SEQ ID NO: 2667 - DNA, 25 bp, Homo sapiens
  source 1..25: mol_type = genomic DNA
gtggtggtgatggtgatgcttctgg

SEQ ID NO: 2668 - DNA, 25 bp, Homo sapiens
  source 1..25: mol_type = genomic DNA
tggtggtgatggtgatgcttctggt

SEQ ID NO: 2669 - DNA, 25 bp, Homo sapiens
  source 1..25: mol_type = genomic DNA
ggtggtgatggtgatgcttctggtg

SEQ ID NO: 2670 - DNA, 25 bp, Homo sapiens
  source 1..25: mol_type = genomic DNA
gtggtgatggtgatgcttctggtga

SEQ ID NO: 2671 - DNA, 25 bp, Homo sapiens
  source 1..25: mol_type = genomic DNA
tggtgatggtgatgcttctggtgat

SEQ ID NO: 2672 - DNA, 25 bp, Homo sapiens
  source 1..25: mol_type = genomic DNA
ggtgatggtgatgcttctggtgatg

SEQ ID NO: 2673 - DNA, 25 bp, Homo sapiens
  source 1..25: mol_type = genomic DNA
gtgatggtgatgcttctggtgatgg

SEQ ID NO: 2674 - DNA, 25 bp, Homo sapiens
  source 1..25: mol_type = genomic DNA
tgatggtgatgcttctggtgatggt

SEQ ID NO: 2675 - DNA, 25 bp, Homo sapiens
  source 1..25: mol_type = genomic DNA
gatggtgatgcttctggtgatggtg

SEQ ID NO: 2676 - DNA, 25 bp, Homo sapiens
  source 1..25: mol_type = genomic DNA
atggtgatgcttctggtgatggtgg

SEQ ID NO: 2677 - DNA, 25 bp, Homo sapiens
  source 1..25: mol_type = genomic DNA
tggtgatgcttctggtgatggtggt

SEQ ID NO: 2678 - DNA, 25 bp, Homo sapiens
  source 1..25: mol_type = genomic DNA
ggtgatgcttctggtgatggtggtc

SEQ ID NO: 2679 - DNA, 25 bp, Homo sapiens
  source 1..25: mol_type = genomic DNA
gtgatgcttctggtgatggtggtca

SEQ ID NO: 2680 - DNA, 25 bp, Homo sapiens
  source 1..25: mol_type = genomic DNA
tgatgcttctggtgatggtggtcat

SEQ ID NO: 2681 - DNA, 25 bp, Homo sapiens
  source 1..25: mol_type = genomic DNA
gatgcttctggtgatggtggtcatg

SEQ ID NO: 2682 - DNA, 25 bp, Homo sapiens
  source 1..25: mol_type = genomic DNA
atgcttctggtgatggtggtcatga

SEQ ID NO: 2683 - DNA, 25 bp, Homo sapiens
  source 1..25: mol_type = genomic DNA
tgcttctggtgatggtggtcatgat

SEQ ID NO: 2684 - DNA, 25 bp, Homo sapiens
  source 1..25: mol_type = genomic DNA
gcttctggtgatggtggtcatgatg

SEQ ID NO: 2685 - DNA, 25 bp, Homo sapiens
  source 1..25: mol_type = genomic DNA
cttctggtgatggtggtcatgatgg

SEQ ID NO: 2686 - DNA, 25 bp, Homo sapiens
  source 1..25: mol_type = genomic DNA
ttctggtgatggtggtcatgatggt

SEQ ID NO: 2687 - DNA, 25 bp, Homo sapiens
  source 1..25: mol_type = genomic DNA
tctggtgatggtggtcatgatggtg

SEQ ID NO: 2688 - DNA, 25 bp, Homo sapiens
  source 1..25: mol_type = genomic DNA
ctggtgatggtggtcatgatggtgg

SEQ ID NO: 2689 - DNA, 25 bp, Homo sapiens
  source 1..25: mol_type = genomic DNA
tggtgatggtggtcatgatggtggt

SEQ ID NO: 2690 - DNA, 25 bp, Homo sapiens
  source 1..25: mol_type = genomic DNA
ggtgatggtggtcatgatggtggtg

SEQ ID NO: 2691 - DNA, 25 bp, Homo sapiens
  source 1..25: mol_type = genomic DNA
gtgatggtggtcatgatggtggtgc

SEQ ID NO: 2692 - DNA, 25 bp, Homo sapiens
  source 1..25: mol_type = genomic DNA
tgatggtggtcatgatggtggtgcc

SEQ ID NO: 2693 - DNA, 25 bp, Homo sapiens
  source 1..25: mol_type = genomic DNA
gatggtggtcatgatggtggtgccg

SEQ ID NO: 2694 - DNA, 25 bp, Homo sapiens
  source 1..25: mol_type = genomic DNA
atggtggtcatgatggtggtgccgt

SEQ ID NO: 2695 - DNA, 25 bp, Homo sapiens
  source 1..25: mol_type = genomic DNA
tggtggtcatgatggtggtgccgtc

SEQ ID NO: 2696 - DNA, 25 bp, Homo sapiens
  source 1..25: mol_type = genomic DNA
ggtggtcatgatggtggtgccgtct

SEQ ID NO: 2697 - DNA, 25 bp, Homo sapiens
  source 1..25: mol_type = genomic DNA
gtggtcatgatggtggtgccgtctg

SEQ ID NO: 2698 - DNA, 25 bp, Homo sapiens
  source 1..25: mol_type = genomic DNA
tggtcatgatggtggtgccgtctgc

SEQ ID NO: 2699 - DNA, 25 bp, Homo sapiens
  source 1..25: mol_type = genomic DNA
ggtcatgatggtggtgccgtctgcc

SEQ ID NO: 2700 - DNA, 25 bp, Homo sapiens
  source 1..25: mol_type = genomic DNA
gtcatgatggtggtgccgtctgcct

SEQ ID NO: 2701 - DNA, 25 bp, Homo sapiens
  source 1..25: mol_type = genomic DNA
tcatgatggtggtgccgtctgcctc

SEQ ID NO: 2702 - DNA, 25 bp, Homo sapiens
  source 1..25: mol_type = genomic DNA
catgatggtggtgccgtctgcctct

SEQ ID NO: 2703 - DNA, 25 bp, Homo sapiens
  source 1..25: mol_type = genomic DNA
atgatggtggtgccgtctgcctctc

SEQ ID NO: 2704 - DNA, 25 bp, Homo sapiens
  source 1..25: mol_type = genomic DNA
tgatggtggtgccgtctgcctctca

SEQ ID NO: 2705 - DNA, 25 bp, Homo sapiens
  source 1..25: mol_type = genomic DNA
gatggtggtgccgtctgcctctcag

SEQ ID NO: 2706 - DNA, 25 bp, Homo sapiens
  source 1..25: mol_type = genomic DNA
atggtggtgccgtctgcctctcagg

SEQ ID NO: 2707 - DNA, 25 bp, Homo sapiens
  source 1..25: mol_type = genomic DNA
tggtggtgccgtctgcctctcagga

SEQ ID NO: 2708 - DNA, 25 bp, Homo sapiens
  source 1..25: mol_type = genomic DNA
ggtggtgccgtctgcctctcaggag

SEQ ID NO: 2709 - DNA, 25 bp, Homo sapiens
  source 1..25: mol_type = genomic DNA
gtggtgccgtctgcctctcaggagc

SEQ ID NO: 2710 - DNA, 25 bp, Homo sapiens
  source 1..25: mol_type = genomic DNA
tggtgccgtctgcctctcaggagct

SEQ ID NO: 2711 - DNA, 25 bp, Homo sapiens
  source 1..25: mol_type = genomic DNA
ggtgccgtctgcctctcaggagctg

SEQ ID NO: 2712 - DNA, 25 bp, Homo sapiens
  source 1..25: mol_type = genomic DNA
gtgccgtctgcctctcaggagctgg

SEQ ID NO: 2713 - DNA, 25 bp, Homo sapiens
  source 1..25: mol_type = genomic DNA
tgccgtctgcctctcaggagctggt

SEQ ID NO: 2714 - DNA, 25 bp, Homo sapiens
  source 1..25: mol_type = genomic DNA
gccgtctgcctctcaggagctggtc

SEQ ID NO: 2715 - DNA, 25 bp, Homo sapiens
  source 1..25: mol_type = genomic DNA
ccgtctgcctctcaggagctggtca

SEQ ID NO: 2716 - DNA, 25 bp, Homo sapiens
  source 1..25: mol_type = genomic DNA
cgtctgcctctcaggagctggtcac

SEQ ID NO: 2717 - DNA, 25 bp, Homo sapiens
  source 1..25: mol_type = genomic DNA
gtctgcctctcaggagctggtcact

SEQ ID NO: 2718 - DNA, 25 bp, Homo sapiens
  source 1..25: mol_type = genomic DNA
tctgcctctcaggagctggtcactg

SEQ ID NO: 2719 - DNA, 25 bp, Homo sapiens
  source 1..25: mol_type = genomic DNA
ctgcctctcaggagctggtcactgc

SEQ ID NO: 2720 - DNA, 25 bp, Homo sapiens
  source 1..25: mol_type = genomic DNA
tgcctctcaggagctggtcactgcc

SEQ ID NO: 2721 - DNA, 25 bp, Homo sapiens
  source 1..25: mol_type = genomic DNA
gcctctcaggagctggtcactgcct

SEQ ID NO: 2722 - DNA, 25 bp, Homo sapiens
  source 1..25: mol_type = genomic DNA
cctctcaggagctggtcactgcctg

SEQ ID NO: 2723 - DNA, 25 bp, Homo sapiens
  source 1..25: mol_type = genomic DNA
ctctcaggagctggtcactgcctgg

SEQ ID NO: 2724 - DNA, 25 bp, Homo sapiens
  source 1..25: mol_type = genomic DNA
tctcaggagctggtcactgcctggt

SEQ ID NO: 2725 - DNA, 25 bp, Homo sapiens
  source 1..25: mol_type = genomic DNA
ctcaggagctggtcactgcctggta

SEQ ID NO: 2726 - DNA, 25 bp, Homo sapiens
  source 1..25: mol_type = genomic DNA
tcaggagctggtcactgcctggtac

SEQ ID NO: 2727 - DNA, 25 bp, Homo sapiens
  source 1..25: mol_type = genomic DNA
caggagctggtcactgcctggtaca

SEQ ID NO: 2728 - DNA, 25 bp, Homo sapiens
  source 1..25: mol_type = genomic DNA
aggagctggtcactgcctggtacat

SEQ ID NO: 2729 - DNA, 25 bp, Homo sapiens
  source 1..25: mol_type = genomic DNA
ggagctggtcactgcctggtacatc

SEQ ID NO: 2730 - DNA, 25 bp, Homo sapiens
  source 1..25: mol_type = genomic DNA
gagctggtcactgcctggtacatcg

SEQ ID NO: 2731 - DNA, 25 bp, Homo sapiens
  source 1..25: mol_type = genomic DNA
agctggtcactgcctggtacatcgg

SEQ ID NO: 2732 - DNA, 25 bp, Homo sapiens
  source 1..25: mol_type = genomic DNA
gctggtcactgcctggtacatcggc

SEQ ID NO: 2733 - DNA, 25 bp, Homo sapiens
  source 1..25: mol_type = genomic DNA
ctggtcactgcctggtacatcggct

SEQ ID NO: 2734 - DNA, 25 bp, Homo sapiens
  source 1..25: mol_type = genomic DNA
tggtcactgcctggtacatcggctt

SEQ ID NO: 2735 - DNA, 25 bp, Homo sapiens
  source 1..25: mol_type = genomic DNA
ggtcactgcctggtacatcggcttc

SEQ ID NO: 2736 - DNA, 25 bp, Homo sapiens
  source 1..25: mol_type = genomic DNA
gtcactgcctggtacatcggcttcc

SEQ ID NO: 2737 - DNA, 25 bp, Homo sapiens
  source 1..25: mol_type = genomic DNA
tcactgcctggtacatcggcttcct

SEQ ID NO: 2738 - DNA, 25 bp, Homo sapiens
  source 1..25: mol_type = genomic DNA
cactgcctggtacatcggcttcctt

SEQ ID NO: 2739 - DNA, 25 bp, Homo sapiens
  source 1..25: mol_type = genomic DNA
actgcctggtacatcggcttccttt

SEQ ID NO: 2740 - DNA, 25 bp, Homo sapiens
  source 1..25: mol_type = genomic DNA
ctgcctggtacatcggcttcctttg

SEQ ID NO: 2741 - DNA, 25 bp, Homo sapiens
  source 1..25: mol_type = genomic DNA
tgcctggtacatcggcttcctttgt

SEQ ID NO: 2742 - DNA, 25 bp, Homo sapiens
  source 1..25: mol_type = genomic DNA
gcctggtacatcggcttcctttgtc

SEQ ID NO: 2743 - DNA, 25 bp, Homo sapiens
  source 1..25: mol_type = genomic DNA
cctggtacatcggcttcctttgtct

SEQ ID NO: 2744 - DNA, 25 bp, Homo sapiens
  source 1..25: mol_type = genomic DNA
ctggtacatcggcttcctttgtctc

SEQ ID NO: 2745 - DNA, 25 bp, Homo sapiens
  source 1..25: mol_type = genomic DNA
tggtacatcggcttcctttgtctca

SEQ ID NO: 2746 - DNA, 25 bp, Homo sapiens
  source 1..25: mol_type = genomic DNA
ggtacatcggcttcctttgtctcat

SEQ ID NO: 2747 - DNA, 25 bp, Homo sapiens
  source 1..25: mol_type = genomic DNA
gtacatcggcttcctttgtctcatc

SEQ ID NO: 2748 - DNA, 25 bp, Homo sapiens
  source 1..25: mol_type = genomic DNA
tacatcggcttcctttgtctcatcc

SEQ ID NO: 2749 - DNA, 25 bp, Homo sapiens
  source 1..25: mol_type = genomic DNA
acatcggcttcctttgtctcatcct

SEQ ID NO: 2750 - DNA, 25 bp, Homo sapiens
  source 1..25: mol_type = genomic DNA
catcggcttcctttgtctcatcctg

SEQ ID NO: 2751 - DNA, 25 bp, Homo sapiens
  source 1..25: mol_type = genomic DNA
atcggcttcctttgtctcatcctgg

SEQ ID NO: 2752 - DNA, 25 bp, Homo sapiens
  source 1..25: mol_type = genomic DNA
tcggcttcctttgtctcatcctggc

SEQ ID NO: 2753 - DNA, 25 bp, Homo sapiens
  source 1..25: mol_type = genomic DNA
cggcttcctttgtctcatcctggcc

SEQ ID NO: 2754 - DNA, 25 bp, Homo sapiens
  source 1..25: mol_type = genomic DNA
ggcttcctttgtctcatcctggcct

SEQ ID NO: 2755 - DNA, 25 bp, Homo sapiens
  source 1..25: mol_type = genomic DNA
gcttcctttgtctcatcctggcctc

SEQ ID NO: 2756 - DNA, 25 bp, Homo sapiens
  source 1..25: mol_type = genomic DNA
cttcctttgtctcatcctggcctcg

SEQ ID NO: 2757 - DNA, 25 bp, Homo sapiens
  source 1..25: mol_type = genomic DNA
ttcctttgtctcatcctggcctcgt

SEQ ID NO: 2758 - DNA, 25 bp, Homo sapiens
  source 1..25: mol_type = genomic DNA
tcctttgtctcatcctggcctcgtt

SEQ ID NO: 2759 - DNA, 25 bp, Homo sapiens
  source 1..25: mol_type = genomic DNA
cctttgtctcatcctggcctcgttc

SEQ ID NO: 2760 - DNA, 25 bp, Homo sapiens
  source 1..25: mol_type = genomic DNA
ctttgtctcatcctggcctcgttcc

SEQ ID NO: 2761 - DNA, 25 bp, Homo sapiens
  source 1..25: mol_type = genomic DNA
tttgtctcatcctggcctcgttcct

SEQ ID NO: 2762 - DNA, 25 bp, Homo sapiens
  source 1..25: mol_type = genomic DNA
ttgtctcatcctggcctcgttcctg

SEQ ID NO: 2763 - DNA, 25 bp, Homo sapiens
  source 1..25: mol_type = genomic DNA
tgtctcatcctggcctcgttcctgg

SEQ ID NO: 2764 - DNA, 25 bp, Homo sapiens
  source 1..25: mol_type = genomic DNA
gtctcatcctggcctcgttcctggt

SEQ ID NO: 2765 - DNA, 25 bp, Homo sapiens
  source 1..25: mol_type = genomic DNA
tctcatcctggcctcgttcctggtg

SEQ ID NO: 2766 - DNA, 25 bp, Homo sapiens
  source 1..25: mol_type = genomic DNA
ctcatcctggcctcgttcctggtgt

SEQ ID NO: 2767 - DNA, 25 bp, Homo sapiens
  source 1..25: mol_type = genomic DNA
tcatcctggcctcgttcctggtgta

SEQ ID NO: 2768 - DNA, 25 bp, Homo sapiens
  source 1..25: mol_type = genomic DNA
catcctggcctcgttcctggtgtac

SEQ ID NO: 2769 - DNA, 25 bp, Homo sapiens
  source 1..25: mol_type = genomic DNA
atcctggcctcgttcctggtgtact

SEQ ID NO: 2770 - DNA, 25 bp, Homo sapiens
  source 1..25: mol_type = genomic DNA
tcctggcctcgttcctggtgtactt

SEQ ID NO: 2771 - DNA, 25 bp, Homo sapiens
  source 1..25: mol_type = genomic DNA
cctggcctcgttcctggtgtacttg

SEQ ID NO: 2772 - DNA, 25 bp, Homo sapiens
  source 1..25: mol_type = genomic DNA
ctggcctcgttcctggtgtacttgg

SEQ ID NO: 2773 - DNA, 25 bp, Homo sapiens
  source 1..25: mol_type = genomic DNA
tggcctcgttcctggtgtacttggc

SEQ ID NO: 2774 - DNA, 25 bp, Homo sapiens
  source 1..25: mol_type = genomic DNA
ggcctcgttcctggtgtacttggca

SEQ ID NO: 2775 - DNA, 25 bp, Homo sapiens
  source 1..25: mol_type = genomic DNA
gcctcgttcctggtgtacttggcag

SEQ ID NO: 2776 - DNA, 25 bp, Homo sapiens
  source 1..25: mol_type = genomic DNA
cctcgttcctggtgtacttggcaga

SEQ ID NO: 2777 - DNA, 25 bp, Homo sapiens
  source 1..25: mol_type = genomic DNA
ctcgttcctggtgtacttggcagag

SEQ ID NO: 2778 - DNA, 25 bp, Homo sapiens
  source 1..25: mol_type = genomic DNA
tcgttcctggtgtacttggcagaga

SEQ ID NO: 2779 - DNA, 25 bp, Homo sapiens
  source 1..25: mol_type = genomic DNA
cgttcctggtgtacttggcagagaa

SEQ ID NO: 2780 - DNA, 25 bp, Homo sapiens
  source 1..25: mol_type = genomic DNA
gttcctggtgtacttggcagagaag

SEQ ID NO: 2781 - DNA, 25 bp, Homo sapiens
  source 1..25: mol_type = genomic DNA
ttcctggtgtacttggcagagaagg

SEQ ID NO: 2782 - DNA, 25 bp, Homo sapiens
  source 1..25: mol_type = genomic DNA
tcctggtgtacttggcagagaaggg

SEQ ID NO: 2783 - DNA, 25 bp, Homo sapiens
  source 1..25: mol_type = genomic DNA
cctggtgtacttggcagagaagggg

SEQ ID NO: 2784 - DNA, 25 bp, Homo sapiens
  source 1..25: mol_type = genomic DNA
ctggtgtacttggcagagaaggggg

SEQ ID NO: 2785 - DNA, 25 bp, Homo sapiens
  source 1..25: mol_type = genomic DNA
tggtgtacttggcagagaaggggga

SEQ ID NO: 2786 - DNA, 25 bp, Homo sapiens
  source 1..25: mol_type = genomic DNA
ggtgtacttggcagagaagggggag

SEQ ID NO: 2787 - DNA, 25 bp, Homo sapiens
  source 1..25: mol_type = genomic DNA
gtgtacttggcagagaagggggaga

SEQ ID NO: 2788 - DNA, 25 bp, Homo sapiens
  source 1..25: mol_type = genomic DNA
tgtacttggcagagaagggggagaa

SEQ ID NO: 2789 - DNA, 25 bp, Homo sapiens
  source 1..25: mol_type = genomic DNA
gtacttggcagagaagggggagaac

SEQ ID NO: 2790 - DNA, 25 bp, Homo sapiens
  source 1..25: mol_type = genomic DNA
tacttggcagagaagggggagaacg

SEQ ID NO: 2791 - DNA, 25 bp, Homo sapiens
  source 1..25: mol_type = genomic DNA
acttggcagagaagggggagaacga

SEQ ID NO: 2792 - DNA, 25 bp, Homo sapiens
  source 1..25: mol_type = genomic DNA
cttggcagagaagggggagaacgac

SEQ ID NO: 2793 - DNA, 25 bp, Homo sapiens
  source 1..25: mol_type = genomic DNA
ttggcagagaagggggagaacgacc

SEQ ID NO: 2794 - DNA, 25 bp, Homo sapiens
  source 1..25: mol_type = genomic DNA
tggcagagaagggggagaacgacca

SEQ ID NO: 2795 - DNA, 25 bp, Homo sapiens
  source 1..25: mol_type = genomic DNA
ggcagagaagggggagaacgaccac

SEQ ID NO: 2796 - DNA, 25 bp, Homo sapiens
  source 1..25: mol_type = genomic DNA
gcagagaagggggagaacgaccact

SEQ ID NO: 2797 - DNA, 25 bp, Homo sapiens
  source 1..25: mol_type = genomic DNA
cagagaagggggagaacgaccactt

SEQ ID NO: 2798 - DNA, 25 bp, Homo sapiens
  source 1..25: mol_type = genomic DNA
agagaagggggagaacgaccacttt

SEQ ID NO: 2799 - DNA, 25 bp, Homo sapiens
  source 1..25: mol_type = genomic DNA
gagaagggggagaacgaccactttg

SEQ ID NO: 2800 - DNA, 25 bp, Homo sapiens
  source 1..25: mol_type = genomic DNA
agaagggggagaacgaccactttga

SEQ ID NO: 2801 - DNA, 25 bp, Homo sapiens
  source 1..25: mol_type = genomic DNA
gaagggggagaacgaccactttgac

SEQ ID NO: 2802 - DNA, 25 bp, Homo sapiens
  source 1..25: mol_type = genomic DNA
aagggggagaacgaccactttgaca

SEQ ID NO: 2803 - DNA, 25 bp, Homo sapiens
  source 1..25: mol_type = genomic DNA
agggggagaacgaccactttgacac

SEQ ID NO: 2804 - DNA, 25 bp, Homo sapiens
  source 1..25: mol_type = genomic DNA
gggggagaacgaccactttgacacc

SEQ ID NO: 2805 - DNA, 25 bp, Homo sapiens
  source 1..25: mol_type = genomic DNA
ggggagaacgaccactttgacacct

SEQ ID NO: 2806 - DNA, 25 bp, Homo sapiens
  source 1..25: mol_type = genomic DNA
gggagaacgaccactttgacaccta

SEQ ID NO: 2807 - DNA, 25 bp, Homo sapiens
  source 1..25: mol_type = genomic DNA
ggagaacgaccactttgacacctac

SEQ ID NO: 2808 - DNA, 25 bp, Homo sapiens
  source 1..25: mol_type = genomic DNA
gagaacgaccactttgacacctacg

SEQ ID NO: 2809 - DNA, 25 bp, Homo sapiens
  source 1..25: mol_type = genomic DNA
agaacgaccactttgacacctacgc

SEQ ID NO: 2810 - DNA, 25 bp, Homo sapiens
  source 1..25: mol_type = genomic DNA
gaacgaccactttgacacctacgcg

SEQ ID NO: 2811 - DNA, 25 bp, Homo sapiens
  source 1..25: mol_type = genomic DNA
aacgaccactttgacacctacgcgg

SEQ ID NO: 2812 - DNA, 25 bp, Homo sapiens
  source 1..25: mol_type = genomic DNA
acgaccactttgacacctacgcgga

SEQ ID NO: 2813 - DNA, 25 bp, Homo sapiens
  source 1..25: mol_type = genomic DNA
cgaccactttgacacctacgcggat

SEQ ID NO: 2814 - DNA, 25 bp, Homo sapiens
  source 1..25: mol_type = genomic DNA
gaccactttgacacctacgcggatg

SEQ ID NO: 2815 - DNA, 25 bp, Homo sapiens
  source 1..25: mol_type = genomic DNA
accactttgacacctacgcggatgc

SEQ ID NO: 2816 - DNA, 25 bp, Homo sapiens
  source 1..25: mol_type = genomic DNA
ccactttgacacctacgcggatgca

SEQ ID NO: 2817 - DNA, 25 bp, Homo sapiens
  source 1..25: mol_type = genomic DNA
cactttgacacctacgcggatgcac

SEQ ID NO: 2818 - DNA, 25 bp, Homo sapiens
  source 1..25: mol_type = genomic DNA
actttgacacctacgcggatgcact

SEQ ID NO: 2819 - DNA, 25 bp, Homo sapiens
  source 1..25: mol_type = genomic DNA
ctttgacacctacgcggatgcactc

SEQ ID NO: 2820 - DNA, 25 bp, Homo sapiens
  source 1..25: mol_type = genomic DNA
tttgacacctacgcggatgcactct

SEQ ID NO: 2821 - DNA, 25 bp, Homo sapiens
  source 1..25: mol_type = genomic DNA
ttgacacctacgcggatgcactctg

SEQ ID NO: 2822 - DNA, 25 bp, Homo sapiens
  source 1..25: mol_type = genomic DNA
tgacacctacgcggatgcactctgg

SEQ ID NO: 2823 - DNA, 25 bp, Homo sapiens
  source 1..25: mol_type = genomic DNA
gacacctacgcggatgcactctggt

SEQ ID NO: 2824 - DNA, 25 bp, Homo sapiens
  source 1..25: mol_type = genomic DNA
acacctacgcggatgcactctggtg

SEQ ID NO: 2825 - DNA, 25 bp, Homo sapiens
  source 1..25: mol_type = genomic DNA
cacctacgcggatgcactctggtgg

SEQ ID NO: 2826 - DNA, 25 bp, Homo sapiens
  source 1..25: mol_type = genomic DNA
acctacgcggatgcactctggtggg

SEQ ID NO: 2827 - DNA, 25 bp, Homo sapiens
  source 1..25: mol_type = genomic DNA
cctacgcggatgcactctggtgggg

SEQ ID NO: 2828 - DNA, 25 bp, Homo sapiens
  source 1..25: mol_type = genomic DNA
ctacgcggatgcactctggtggggc

SEQ ID NO: 2829 - DNA, 25 bp, Homo sapiens
  source 1..25: mol_type = genomic DNA
tacgcggatgcactctggtggggcc

SEQ ID NO: 2830 - DNA, 25 bp, Homo sapiens
  source 1..25: mol_type = genomic DNA
acgcggatgcactctggtggggcct

SEQ ID NO: 2831 - DNA, 25 bp, Homo sapiens
  source 1..25: mol_type = genomic DNA
cgcggatgcactctggtggggcctg

SEQ ID NO: 2832 - DNA, 25 bp, Homo sapiens
  source 1..25: mol_type = genomic DNA
gcggatgcactctggtggggcctgg

SEQ ID NO: 2833 - DNA, 25 bp, Homo sapiens
  source 1..25: mol_type = genomic DNA
cggatgcactctggtggggcctggt

SEQ ID NO: 2834 - DNA, 25 bp, Homo sapiens
  source 1..25: mol_type = genomic DNA
ggatgcactctggtggggcctggtg

SEQ ID NO: 2835 - DNA, 25 bp, Homo sapiens
  source 1..25: mol_type = genomic DNA
gatgcactctggtggggcctggtga

SEQ ID NO: 2836 - DNA, 25 bp, Homo sapiens
  source 1..25: mol_type = genomic DNA
atgcactctggtggggcctggtgag

SEQ ID NO: 2837 - DNA, 25 bp, Homo sapiens
  source 1..25: mol_type = genomic DNA
tgcactctggtggggcctggtgagt

SEQ ID NO: 2838 - DNA, 25 bp, Homo sapiens
  source 1..25: mol_type = genomic DNA
gcactctggtggggcctggtgagtt

SEQ ID NO: 2839 - DNA, 25 bp, Homo sapiens
  source 1..25: mol_type = genomic DNA
cactctggtggggcctggtgagttg

SEQ ID NO: 2840 - DNA, 25 bp, Homo sapiens
  source 1..25: mol_type = genomic DNA
actctggtggggcctggtgagttgt

SEQ ID NO: 2841 - DNA, 25 bp, Homo sapiens
  source 1..25: mol_type = genomic DNA
ctctggtggggcctggtgagttgtg

SEQ ID NO: 2842 - DNA, 25 bp, Homo sapiens
  source 1..25: mol_type = genomic DNA
tctggtggggcctggtgagttgtgg

SEQ ID NO: 2843 - DNA, 25 bp, Homo sapiens
  source 1..25: mol_type = genomic DNA
ctggtggggcctggtgagttgtggt

SEQ ID NO: 2844 - DNA, 25 bp, Homo sapiens
  source 1..25: mol_type = genomic DNA
tggtggggcctggtgagttgtggtc

SEQ ID NO: 2845 - DNA, 25 bp, Homo sapiens
  source 1..25: mol_type = genomic DNA
ggtggggcctggtgagttgtggtca

SEQ ID NO: 2846 - DNA, 25 bp, Homo sapiens
  source 1..25: mol_type = genomic DNA
gtggggcctggtgagttgtggtcat

SEQ ID NO: 2847 - DNA, 25 bp, Homo sapiens
  source 1..25: mol_type = genomic DNA
tggggcctggtgagttgtggtcatt

SEQ ID NO: 2848 - DNA, 25 bp, Homo sapiens
  source 1..25: mol_type = genomic DNA
ggggcctggtgagttgtggtcattg

SEQ ID NO: 2849 - DNA, 25 bp, Homo sapiens
  source 1..25: mol_type = genomic DNA
gggcctggtgagttgtggtcattgt

SEQ ID NO: 2850 - DNA, 25 bp, Homo sapiens
  source 1..25: mol_type = genomic DNA
ggcctggtgagttgtggtcattgtg

SEQ ID NO: 2851 - DNA, 25 bp, Homo sapiens
  source 1..25: mol_type = genomic DNA
gcctggtgagttgtggtcattgtgg

SEQ ID NO: 2852 - DNA, 25 bp, Homo sapiens
  source 1..25: mol_type = genomic DNA
cctggtgagttgtggtcattgtggt

SEQ ID NO: 2853 - DNA, 25 bp, Homo sapiens
  source 1..25: mol_type = genomic DNA
ctggtgagttgtggtcattgtggtt

SEQ ID NO: 2854 - DNA, 25 bp, Homo sapiens
  source 1..25: mol_type = genomic DNA
tggtgagttgtggtcattgtggttt

SEQ ID NO: 2855 - DNA, 25 bp, Homo sapiens
  source 1..25: mol_type = genomic DNA
ggtgagttgtggtcattgtggtttt

SEQ ID NO: 2856 - DNA, 25 bp, Homo sapiens
  source 1..25: mol_type = genomic DNA
gtgagttgtggtcattgtggttttc

SEQ ID NO: 2857 - DNA, 25 bp, Homo sapiens
  source 1..25: mol_type = genomic DNA
tgagttgtggtcattgtggttttcc

SEQ ID NO: 2858 - DNA, 25 bp, Homo sapiens
  source 1..25: mol_type = genomic DNA
gagttgtggtcattgtggttttccc

SEQ ID NO: 2859 - DNA, 25 bp, Homo sapiens
  source 1..25: mol_type = genomic DNA
agttgtggtcattgtggttttccct

SEQ ID NO: 2860 - DNA, 25 bp, Homo sapiens
  source 1..25: mol_type = genomic DNA
gttgtggtcattgtggttttccctt

SEQ ID NO: 2861 - DNA, 25 bp, Homo sapiens
  source 1..25: mol_type = genomic DNA
ttgtggtcattgtggttttcccttt

SEQ ID NO: 2862 - DNA, 25 bp, Homo sapiens
  source 1..25: mol_type = genomic DNA
tgtggtcattgtggttttccctttc

SEQ ID NO: 2863 - DNA, 25 bp, Homo sapiens
  source 1..25: mol_type = genomic DNA
gtggtcattgtggttttccctttcc

SEQ ID NO: 2864 - DNA, 25 bp, Homo sapiens
  source 1..25: mol_type = genomic DNA
tggtcattgtggttttccctttccc

SEQ ID NO: 2865 - DNA, 25 bp, Homo sapiens
  source 1..25: mol_type = genomic DNA
ggtcattgtggttttccctttccct

SEQ ID NO: 2866 - DNA, 25 bp, Homo sapiens
  source 1..25: mol_type = genomic DNA
gtcattgtggttttccctttccctg

SEQ ID NO: 2867 - DNA, 25 bp, Homo sapiens
  source 1..25: mol_type = genomic DNA
tcattgtggttttccctttccctgc

SEQ ID NO: 2868 - DNA, 25 bp, Homo sapiens
  source 1..25: mol_type = genomic DNA
cattgtggttttccctttccctgct

SEQ ID NO: 2869 - DNA, 25 bp, Homo sapiens
  source 1..25: mol_type = genomic DNA
attgtggttttccctttccctgctg

SEQ ID NO: 2870 - DNA, 25 bp, Homo sapiens
  source 1..25: mol_type = genomic DNA
ttgtggttttccctttccctgctga

SEQ ID NO: 2871 - DNA, 25 bp, Homo sapiens
  source 1..25: mol_type = genomic DNA
tgtggttttccctttccctgctgat

SEQ ID NO: 2872 - DNA, 25 bp, Homo sapiens
  source 1..25: mol_type = genomic DNA
gtggttttccctttccctgctgata

SEQ ID NO: 2873 - DNA, 25 bp, Homo sapiens
  source 1..25: mol_type = genomic DNA
tggttttccctttccctgctgatac

SEQ ID NO: 2874 - DNA, 25 bp, Homo sapiens
  source 1..25: mol_type = genomic DNA
ggttttccctttccctgctgataca

SEQ ID NO: 2875 - DNA, 25 bp, Homo sapiens
  source 1..25: mol_type = genomic DNA
gttttccctttccctgctgatacac

SEQ ID NO: 2876 - DNA, 25 bp, Homo sapiens
  source 1..25: mol_type = genomic DNA
ttttccctttccctgctgatacacc

SEQ ID NO: 2877 - DNA, 25 bp, Homo sapiens
  source 1..25: mol_type = genomic DNA
tttccctttccctgctgatacaccc

SEQ ID NO: 2878 - DNA, 25 bp, Homo sapiens
  source 1..25: mol_type = genomic DNA
ttccctttccctgctgatacacccc

SEQ ID NO: 2879 - DNA, 25 bp, Homo sapiens
  source 1..25: mol_type = genomic DNA
tccctttccctgctgatacacccct

SEQ ID NO: 2880 - DNA, 25 bp, Homo sapiens
  source 1..25: mol_type = genomic DNA
ccctttccctgctgatacacccctg

SEQ ID NO: 2881 - DNA, 25 bp, Homo sapiens
  source 1..25: mol_type = genomic DNA
cctttccctgctgatacacccctgt

SEQ ID NO: 2882 - DNA, 25 bp, Homo sapiens
  source 1..25: mol_type = genomic DNA
ctttccctgctgatacacccctgtc

SEQ ID NO: 2883 - DNA, 25 bp, Homo sapiens
  source 1..25: mol_type = genomic DNA
tttccctgctgatacacccctgtcc

SEQ ID NO: 2884 - DNA, 25 bp, Homo sapiens
  source 1..25: mol_type = genomic DNA
ttccctgctgatacacccctgtccc

SEQ ID NO: 2885 - DNA, 25 bp, Homo sapiens
  source 1..25: mol_type = genomic DNA
tccctgctgatacacccctgtccct

SEQ ID NO: 2886 - DNA, 25 bp, Homo sapiens
  source 1..25: mol_type = genomic DNA
ccctgctgatacacccctgtccctg

SEQ ID NO: 2887 - DNA, 25 bp, Homo sapiens
  source 1..25: mol_type = genomic DNA
cctgctgatacacccctgtccctgt

SEQ ID NO: 2888 - DNA, 25 bp, Homo sapiens
  source 1..25: mol_type = genomic DNA
ctgctgatacacccctgtccctgtg

SEQ ID NO: 2889 - DNA, 25 bp, Homo sapiens
  source 1..25: mol_type = genomic DNA
tgctgatacacccctgtccctgtgc

SEQ ID NO: 2890 - DNA, 25 bp, Homo sapiens
  source 1..25: mol_type = genomic DNA
gctgatacacccctgtccctgtgct

SEQ ID NO: 2891 - DNA, 25 bp, Homo sapiens
  source 1..25: mol_type = genomic DNA
ctgatacacccctgtccctgtgctg

SEQ ID NO: 2892 - DNA, 25 bp, Homo sapiens
  source 1..25: mol_type = genomic DNA
tgatacacccctgtccctgtgctgg

SEQ ID NO: 2893 - DNA, 25 bp, Homo sapiens
  source 1..25: mol_type = genomic DNA
gatacacccctgtccctgtgctggg

SEQ ID NO: 2894 - DNA, 25 bp, Homo sapiens
  source 1..25: mol_type = genomic DNA
atacacccctgtccctgtgctggga

SEQ ID NO: 2895 - DNA, 25 bp, Homo sapiens
  source 1..25: mol_type = genomic DNA
tacacccctgtccctgtgctgggac

SEQ ID NO: 2896 - DNA, 25 bp, Homo sapiens
  source 1..25: mol_type = genomic DNA
acacccctgtccctgtgctgggacc

SEQ ID NO: 2897 - DNA, 25 bp, Homo sapiens
  source 1..25: mol_type = genomic DNA
cacccctgtccctgtgctgggacca

SEQ ID NO: 2898 - DNA, 25 bp, Homo sapiens
  source 1..25: mol_type = genomic DNA
acccctgtccctgtgctgggaccag

SEQ ID NO: 2899 - DNA, 25 bp, Homo sapiens
  source 1..25: mol_type = genomic DNA
cccctgtccctgtgctgggaccagg

SEQ ID NO: 2900 - DNA, 25 bp, Homo sapiens
  source 1..25: mol_type = genomic DNA
ccctgtccctgtgctgggaccaggc

SEQ ID NO: 2901 - DNA, 25 bp, Homo sapiens
  source 1..25: mol_type = genomic DNA
cctgtccctgtgctgggaccaggct

SEQ ID NO: 2902 - DNA, 25 bp, Homo sapiens
  source 1..25: mol_type = genomic DNA
ctgtccctgtgctgggaccaggctc

SEQ ID NO: 2903 - DNA, 25 bp, Homo sapiens
  source 1..25: mol_type = genomic DNA
tgtccctgtgctgggaccaggctct

SEQ ID NO: 2904 - DNA, 25 bp, Homo sapiens
  source 1..25: mol_type = genomic DNA
gtccctgtgctgggaccaggctctc

SEQ ID NO: 2905 - DNA, 25 bp, Homo sapiens
  source 1..25: mol_type = genomic DNA
tccctgtgctgggaccaggctctca

SEQ ID NO: 2906 - DNA, 25 bp, Homo sapiens
  source 1..25: mol_type = genomic DNA
ccctgtgctgggaccaggctctcac

SEQ ID NO: 2907 - DNA, 25 bp, Homo sapiens
  source 1..25: mol_type = genomic DNA
cctgtgctgggaccaggctctcact

SEQ ID NO: 2908 - DNA, 25 bp, Homo sapiens
  source 1..25: mol_type = genomic DNA
ctgtgctgggaccaggctctcactg

SEQ ID NO: 2909 - DNA, 25 bp, Homo sapiens
  source 1..25: mol_type = genomic DNA
tgtgctgggaccaggctctcactgg

SEQ ID NO: 2910 - DNA, 25 bp, Homo sapiens
  source 1..25: mol_type = genomic DNA
gtgctgggaccaggctctcactggc

SEQ ID NO: 2911 - DNA, 25 bp, Homo sapiens
  source 1..25: mol_type = genomic DNA
tgctgggaccaggctctcactggct

SEQ ID NO: 2912 - DNA, 25 bp, Homo sapiens
  source 1..25: mol_type = genomic DNA
gctgggaccaggctctcactggctg

SEQ ID NO: 2913 - DNA, 25 bp, Homo sapiens
  source 1..25: mol_type = genomic DNA
ctgggaccaggctctcactggctga

SEQ ID NO: 2914 - DNA, 25 bp, Homo sapiens
  source 1..25: mol_type = genomic DNA
tgggaccaggctctcactggctgag

SEQ ID NO: 2915 - DNA, 25 bp, Homo sapiens
  source 1..25: mol_type = genomic DNA
gggaccaggctctcactggctgagc

SEQ ID NO: 2916 - DNA, 25 bp, Homo sapiens
  source 1..25: mol_type = genomic DNA
ggaccaggctctcactggctgagcc

SEQ ID NO: 2917 - DNA, 25 bp, Homo sapiens
  source 1..25: mol_type = genomic DNA
gaccaggctctcactggctgagcct

SEQ ID NO: 2918 - DNA, 25 bp, Homo sapiens
  source 1..25: mol_type = genomic DNA
accaggctctcactggctgagcctg

SEQ ID NO: 2919 - DNA, 25 bp, Homo sapiens
  source 1..25: mol_type = genomic DNA
ccaggctctcactggctgagcctgc

SEQ ID NO: 2920 - DNA, 25 bp, Homo sapiens
  source 1..25: mol_type = genomic DNA
caggctctcactggctgagcctgct

SEQ ID NO: 2921 - DNA, 25 bp, Homo sapiens
  source 1..25: mol_type = genomic DNA
aggctctcactggctgagcctgctc

SEQ ID NO: 2922 - DNA, 25 bp, Homo sapiens
  source 1..25: mol_type = genomic DNA
ggctctcactggctgagcctgctcc

SEQ ID NO: 2923 - DNA, 25 bp, Homo sapiens
  source 1..25: mol_type = genomic DNA
gctctcactggctgagcctgctcca

SEQ ID NO: 2924 - DNA, 25 bp, Homo sapiens
  source 1..25: mol_type = genomic DNA
ctctcactggctgagcctgctccat

SEQ ID NO: 2925 - DNA, 25 bp, Homo sapiens
  source 1..25: mol_type = genomic DNA
tctcactggctgagcctgctccata

SEQ ID NO: 2926 - DNA, 25 bp, Homo sapiens
  source 1..25: mol_type = genomic DNA
ctcactggctgagcctgctccatac

SEQ ID NO: 2927 - DNA, 25 bp, Homo sapiens
  source 1..25: mol_type = genomic DNA
tcactggctgagcctgctccataca

SEQ ID NO: 2928 - DNA, 25 bp, Homo sapiens
  source 1..25: mol_type = genomic DNA
cactggctgagcctgctccatacat

SEQ ID NO: 2929 - DNA, 25 bp, Homo sapiens
  source 1..25: mol_type = genomic DNA
actggctgagcctgctccatacatc

SEQ ID NO: 2930 - DNA, 25 bp, Homo sapiens
  source 1..25: mol_type = genomic DNA
ctggctgagcctgctccatacatct

SEQ ID NO: 2931 - DNA, 25 bp, Homo sapiens
  source 1..25: mol_type = genomic DNA
tggctgagcctgctccatacatctc

SEQ ID NO: 2932 - DNA, 25 bp, Homo sapiens
  source 1..25: mol_type = genomic DNA
ggctgagcctgctccatacatctct

SEQ ID NO: 2933 - DNA, 25 bp, Homo sapiens
  source 1..25: mol_type = genomic DNA
gctgagcctgctccatacatctctt

SEQ ID NO: 2934 - DNA, 25 bp, Homo sapiens
  source 1..25: mol_type = genomic DNA
ctgagcctgctccatacatctcttt

SEQ ID NO: 2935 - DNA, 25 bp, Homo sapiens
  source 1..25: mol_type = genomic DNA
tgagcctgctccatacatctctttg

SEQ ID NO: 2936 - DNA, 25 bp, Homo sapiens
  source 1..25: mol_type = genomic DNA
gagcctgctccatacatctctttgg

SEQ ID NO: 2937 - DNA, 25 bp, Homo sapiens
  source 1..25: mol_type = genomic DNA
agcctgctccatacatctctttggg

SEQ ID NO: 2938 - DNA, 25 bp, Homo sapiens
  source 1..25: mol_type = genomic DNA
gcctgctccatacatctctttgggg

SEQ ID NO: 2939 - DNA, 25 bp, Homo sapiens
  source 1..25: mol_type = genomic DNA
cctgctccatacatctctttggggc

SEQ ID NO: 2940 - DNA, 25 bp, Homo sapiens
  source 1..25: mol_type = genomic DNA
ctgctccatacatctctttggggcc

SEQ ID NO: 2941 - DNA, 25 bp, Homo sapiens
  source 1..25: mol_type = genomic DNA
tgctccatacatctctttggggcca

SEQ ID NO: 2942 - DNA, 25 bp, Homo sapiens
  source 1..25: mol_type = genomic DNA
gctccatacatctctttggggccac

SEQ ID NO: 2943 - DNA, 25 bp, Homo sapiens
  source 1..25: mol_type = genomic DNA
ctccatacatctctttggggccacc

SEQ ID NO: 2944 - DNA, 25 bp, Homo sapiens
  source 1..25: mol_type = genomic DNA
tccatacatctctttggggccacct

SEQ ID NO: 2945 - DNA, 25 bp, Homo sapiens
  source 1..25: mol_type = genomic DNA
ccatacatctctttggggccacctg

SEQ ID NO: 2946 - DNA, 25 bp, Homo sapiens
  source 1..25: mol_type = genomic DNA
catacatctctttggggccacctgc

SEQ ID NO: 2947 - DNA, 25 bp, Homo sapiens
  source 1..25: mol_type = genomic DNA
atacatctctttggggccacctgct

SEQ ID NO: 2948 - DNA, 25 bp, Homo sapiens
  source 1..25: mol_type = genomic DNA
tacatctctttggggccacctgctg

SEQ ID NO: 2949 - DNA, 25 bp, Homo sapiens
  source 1..25: mol_type = genomic DNA
acatctctttggggccacctgctgg

SEQ ID NO: 2950 - DNA, 25 bp, Homo sapiens
  source 1..25: mol_type = genomic DNA
catctctttggggccacctgctggc

SEQ ID NO: 2951 - DNA, 25 bp, Homo sapiens
  source 1..25: mol_type = genomic DNA
atctctttggggccacctgctggct

SEQ ID NO: 2952 - DNA, 25 bp, Homo sapiens
  source 1..25: mol_type = genomic DNA
tctctttggggccacctgctggctg

SEQ ID NO: 2953 - DNA, 25 bp, Homo sapiens
  source 1..25: mol_type = genomic DNA
ctctttggggccacctgctggctgc

SEQ ID NO: 2954 - DNA, 25 bp, Homo sapiens
  source 1..25: mol_type = genomic DNA
tctttggggccacctgctggctgcc

SEQ ID NO: 2955 - DNA, 25 bp, Homo sapiens
  source 1..25: mol_type = genomic DNA
ctttggggccacctgctggctgccc

SEQ ID NO: 2956 - DNA, 25 bp, Homo sapiens
  source 1..25: mol_type = genomic DNA
tttggggccacctgctggctgcccg

SEQ ID NO: 2957 - DNA, 25 bp, Homo sapiens
  source 1..25: mol_type = genomic DNA
ttggggccacctgctggctgcccgt

SEQ ID NO: 2958 - DNA, 25 bp, Homo sapiens
  source 1..25: mol_type = genomic DNA
tggggccacctgctggctgcccgtg

SEQ ID NO: 2959 - DNA, 25 bp, Homo sapiens
  source 1..25: mol_type = genomic DNA
ggggccacctgctggctgcccgtgg

SEQ ID NO: 2960 - DNA, 25 bp, Homo sapiens
  source 1..25: mol_type = genomic DNA
gggccacctgctggctgcccgtggt

SEQ ID NO: 2961 - DNA, 25 bp, Homo sapiens
  source 1..25: mol_type = genomic DNA
ggccacctgctggctgcccgtggtc

SEQ ID NO: 2962 - DNA, 25 bp, Homo sapiens
  source 1..25: mol_type = genomic DNA
gccacctgctggctgcccgtggtca

SEQ ID NO: 2963 - DNA, 25 bp, Homo sapiens
  source 1..25: mol_type = genomic DNA
ccacctgctggctgcccgtggtcat

SEQ ID NO: 2964 - DNA, 25 bp, Homo sapiens
  source 1..25: mol_type = genomic DNA
cacctgctggctgcccgtggtcatg

SEQ ID NO: 2965 - DNA, 25 bp, Homo sapiens
  source 1..25: mol_type = genomic DNA
acctgctggctgcccgtggtcatga

SEQ ID NO: 2966 - DNA, 25 bp, Homo sapiens
  source 1..25: mol_type = genomic DNA
cctgctggctgcccgtggtcatgat

SEQ ID NO: 2967 - DNA, 25 bp, Homo sapiens
  source 1..25: mol_type = genomic DNA
ctgctggctgcccgtggtcatgatg

SEQ ID NO: 2968 - DNA, 25 bp, Homo sapiens
  source 1..25: mol_type = genomic DNA
tgctggctgcccgtggtcatgatgg

SEQ ID NO: 2969 - DNA, 25 bp, Homo sapiens
  source 1..25: mol_type = genomic DNA
gctggctgcccgtggtcatgatggc

SEQ ID NO: 2970 - DNA, 25 bp, Homo sapiens
  source 1..25: mol_type = genomic DNA
ctggctgcccgtggtcatgatggct

SEQ ID NO: 2971 - DNA, 25 bp, Homo sapiens
  source 1..25: mol_type = genomic DNA
tggctgcccgtggtcatgatggctt

SEQ ID NO: 2972 - DNA, 25 bp, Homo sapiens
  source 1..25: mol_type = genomic DNA
ggctgcccgtggtcatgatggcttg

SEQ ID NO: 2973 - DNA, 25 bp, Homo sapiens
  source 1..25: mol_type = genomic DNA
gctgcccgtggtcatgatggcttgt

SEQ ID NO: 2974 - DNA, 25 bp, Homo sapiens
  source 1..25: mol_type = genomic DNA
ctgcccgtggtcatgatggcttgtg

SEQ ID NO: 2975 - DNA, 25 bp, Homo sapiens
  source 1..25: mol_type = genomic DNA
tgcccgtggtcatgatggcttgtgg

SEQ ID NO: 2976 - DNA, 25 bp, Homo sapiens
  source 1..25: mol_type = genomic DNA
gcccgtggtcatgatggcttgtggt

SEQ ID NO: 2977 - DNA, 25 bp, Homo sapiens
  source 1..25: mol_type = genomic DNA
cccgtggtcatgatggcttgtggtc

SEQ ID NO: 2978 - DNA, 25 bp, Homo sapiens
  source 1..25: mol_type = genomic DNA
ccgtggtcatgatggcttgtggtcg

SEQ ID NO: 2979 - DNA, 25 bp, Homo sapiens
  source 1..25: mol_type = genomic DNA
cgtggtcatgatggcttgtggtcga

SEQ ID NO: 2980 - DNA, 25 bp, Homo sapiens
  source 1..25: mol_type = genomic DNA
gtggtcatgatggcttgtggtcgag

SEQ ID NO: 2981 - DNA, 25 bp, Homo sapiens
  source 1..25: mol_type = genomic DNA
tggtcatgatggcttgtggtcgagg

SEQ ID NO: 2982 - DNA, 25 bp, Homo sapiens
  source 1..25: mol_type = genomic DNA
ggtcatgatggcttgtggtcgaggc

SEQ ID NO: 2983 - DNA, 25 bp, Homo sapiens
  source 1..25: mol_type = genomic DNA
gtcatgatggcttgtggtcgaggcg

SEQ ID NO: 2984 - DNA, 25 bp, Homo sapiens
  source 1..25: mol_type = genomic DNA
tcatgatggcttgtggtcgaggcgg

SEQ ID NO: 2985 - DNA, 25 bp, Homo sapiens
  source 1..25: mol_type = genomic DNA
catgatggcttgtggtcgaggcggg

SEQ ID NO: 2986 - DNA, 25 bp, Homo sapiens
  source 1..25: mol_type = genomic DNA
atgatggcttgtggtcgaggcgggg

SEQ ID NO: 2987 - DNA, 25 bp, Homo sapiens
  source 1..25: mol_type = genomic DNA
tgatggcttgtggtcgaggcggggt

SEQ ID NO: 2988 - DNA, 25 bp, Homo sapiens
  source 1..25: mol_type = genomic DNA
gatggcttgtggtcgaggcggggtg

SEQ ID NO: 2989 - DNA, 25 bp, Homo sapiens
  source 1..25: mol_type = genomic DNA
atggcttgtggtcgaggcggggtgg

SEQ ID NO: 2990 - DNA, 25 bp, Homo sapiens
  source 1..25: mol_type = genomic DNA
tggcttgtggtcgaggcggggtggt

SEQ ID NO: 2991 - DNA, 25 bp, Homo sapiens
  source 1..25: mol_type = genomic DNA
ggcttgtggtcgaggcggggtggtg

SEQ ID NO: 2992 - DNA, 25 bp, Homo sapiens
  source 1..25: mol_type = genomic DNA
gcttgtggtcgaggcggggtggtgg

SEQ ID NO: 2993 - DNA, 25 bp, Homo sapiens
  source 1..25: mol_type = genomic DNA
cttgtggtcgaggcggggtggtggt

SEQ ID NO: 2994 - DNA, 25 bp, Homo sapiens
  source 1..25: mol_type = genomic DNA
ttgtggtcgaggcggggtggtggtt

SEQ ID NO: 2995 - DNA, 25 bp, Homo sapiens
  source 1..25: mol_type = genomic DNA
tgtggtcgaggcggggtggtggttg

SEQ ID NO: 2996 - DNA, 25 bp, Homo sapiens
  source 1..25: mol_type = genomic DNA
gtggtcgaggcggggtggtggttgc

SEQ ID NO: 2997 - DNA, 25 bp, Homo sapiens
  source 1..25: mol_type = genomic DNA
tggtcgaggcggggtggtggttgcc

SEQ ID NO: 2998 - DNA, 25 bp, Homo sapiens
  source 1..25: mol_type = genomic DNA
ggtcgaggcggggtggtggttgcca

SEQ ID NO: 2999 - DNA, 25 bp, Homo sapiens
  source 1..25: mol_type = genomic DNA
gtcgaggcggggtggtggttgccaa

SEQ ID NO: 3000 - DNA, 25 bp, Homo sapiens
  source 1..25: mol_type = genomic DNA
tcgaggcggggtggtggttgccaag

SEQ ID NO: 3001 - DNA, 25 bp, Homo sapiens
  source 1..25: mol_type = genomic DNA
cgaggcggggtggtggttgccaagc

SEQ ID NO: 3002 - DNA, 25 bp, Homo sapiens
  source 1..25: mol_type = genomic DNA
gaggcggggtggtggttgccaagct

SEQ ID NO: 3003 - DNA, 25 bp, Homo sapiens
  source 1..25: mol_type = genomic DNA
aggcggggtggtggttgccaagctg

SEQ ID NO: 3004 - DNA, 25 bp, Homo sapiens
  source 1..25: mol_type = genomic DNA
ggcggggtggtggttgccaagctgg

SEQ ID NO: 3005 - DNA, 25 bp, Homo sapiens
  source 1..25: mol_type = genomic DNA
gcggggtggtggttgccaagctggc

SEQ ID NO: 3006 - DNA, 25 bp, Homo sapiens
  source 1..25: mol_type = genomic DNA
cggggtggtggttgccaagctggcg

SEQ ID NO: 3007 - DNA, 25 bp, Homo sapiens
  source 1..25: mol_type = genomic DNA
ggggtggtggttgccaagctggcgg

SEQ ID NO: 3008 - DNA, 25 bp, Homo sapiens
  source 1..25: mol_type = genomic DNA
gggtggtggttgccaagctggcggg

SEQ ID NO: 3009 - DNA, 25 bp, Homo sapiens
  source 1..25: mol_type = genomic DNA
ggtggtggttgccaagctggcgggg

SEQ ID NO: 3010 - DNA, 25 bp, Homo sapiens
  source 1..25: mol_type = genomic DNA
gtggtggttgccaagctggcggggg

SEQ ID NO: 3011 - DNA, 25 bp, Homo sapiens
  source 1..25: mol_type = genomic DNA
tggtggttgccaagctggcggggga

SEQ ID NO: 3012 - DNA, 25 bp, Homo sapiens
  source 1..25: mol_type = genomic DNA
ggtggttgccaagctggcgggggag

SEQ ID NO: 3013 - DNA, 25 bp, Homo sapiens
  source 1..25: mol_type = genomic DNA
gtggttgccaagctggcgggggagt

SEQ ID NO: 3014 - DNA, 25 bp, Homo sapiens
  source 1..25: mol_type = genomic DNA
tggttgccaagctggcgggggagtg

SEQ ID NO: 3015 - DNA, 25 bp, Homo sapiens
  source 1..25: mol_type = genomic DNA
ggttgccaagctggcgggggagtgg

SEQ ID NO: 3016 - DNA, 25 bp, Homo sapiens
  source 1..25: mol_type = genomic DNA
gttgccaagctggcgggggagtggg

SEQ ID NO: 3017 - DNA, 25 bp, Homo sapiens
  source 1..25: mol_type = genomic DNA
ttgccaagctggcgggggagtgggt

SEQ ID NO: 3018 - DNA, 25 bp, Homo sapiens
  source 1..25: mol_type = genomic DNA
tgccaagctggcgggggagtgggtg

SEQ ID NO: 3019 - DNA, 25 bp, Homo sapiens
  source 1..25: mol_type = genomic DNA
gccaagctggcgggggagtgggtgg

SEQ ID NO: 3020 - DNA, 25 bp, Homo sapiens
  source 1..25: mol_type = genomic DNA
ccaagctggcgggggagtgggtggg

SEQ ID NO: 3021 - DNA, 25 bp, Homo sapiens
  source 1..25: mol_type = genomic DNA
caagctggcgggggagtgggtgggg

SEQ ID NO: 3022 - DNA, 25 bp, Homo sapiens
  source 1..25: mol_type = genomic DNA
aagctggcgggggagtgggtgggga

SEQ ID NO: 3023 - DNA, 25 bp, Homo sapiens
  source 1..25: mol_type = genomic DNA
agctggcgggggagtgggtggggag

SEQ ID NO: 3024 - DNA, 25 bp, Homo sapiens
  source 1..25: mol_type = genomic DNA
gctggcgggggagtgggtggggagg

SEQ ID NO: 3025 - DNA, 25 bp, Homo sapiens
  source 1..25: mol_type = genomic DNA
ctggcgggggagtgggtggggaggg

SEQ ID NO: 3026 - DNA, 25 bp, Homo sapiens
  source 1..25: mol_type = genomic DNA
tggcgggggagtgggtggggagggc

SEQ ID NO: 3027 - DNA, 25 bp, Homo sapiens
  source 1..25: mol_type = genomic DNA
ggcgggggagtgggtggggagggct

SEQ ID NO: 3028 - DNA, 25 bp, Homo sapiens
  source 1..25: mol_type = genomic DNA
gcgggggagtgggtggggagggctg

SEQ ID NO: 3029 - DNA, 25 bp, Homo sapiens
  source 1..25: mol_type = genomic DNA
cgggggagtgggtggggagggctgg

SEQ ID NO: 3030 - DNA, 25 bp, Homo sapiens
  source 1..25: mol_type = genomic DNA
gggggagtgggtggggagggctggg

SEQ ID NO: 3031 - DNA, 25 bp, Homo sapiens
  source 1..25: mol_type = genomic DNA
ggggagtgggtggggagggctgggc

SEQ ID NO: 3032 - RNA, 9301 nt, Homo sapiens
  source 1..9301: mol_type = mRNA
aggcgccgaggtgcgcgcggagcgaggtggccgcagcgtctccgcgcgcggcccaagcccggcaggagtgcggaaccgccgcctcggccatgcggctcccggccggggggcctgggctggggcccgcgccgccccccgcgctccgcccccgctgagcctgagcccgacccggggcgcctcccgccaggcaccatggtgcagaagtcgcgcaacggcggcgtataccccggcccgagcggggagaagaagctgaaggtgggcttcgtggggctggaccccggcgcgcccgactccacccgggacggggcgctgctgatcgccggctccgaggcccccaagcgcggcagcatcctcagcaaacctcgcgcgggcggcgcgggcgccgggaagccccccaagcgcaacgccttctaccgcaagctgcagaatttcctctacaacgtgctggagcggccgcgcggctgggcgttcatctaccacgcctacgtgttcctcctggttttctcctgcctcgtgctgtctgtgttttccaccatcaaggagtatgagaagagctcggagggggccctctacatcctggaaatcgtgactatcgtggtgtttggcgtggagtacttcgtgcggatctgggccgcaggctgctgctgccggtaccgtggctggagggggcggctcaagtttgcccggaaaccgttctgtgtgattgacatcatggtgctcatcgcctccattgcggtgctggccgccggctcccagggcaacgtctttgccacatctgcgctccggagcctgcgcttcctgcagattctgcggatgatccgcatggaccggcggggaggcacctggaagctgctgggctctgtggtctatgcccacagcaaggagctggtcactgcctggtacatcggcttcctttgtctcatcctggcctcgttcctggtgtacttggcagagaagggggagaacgaccactttgacacctacgcggatgcactctggtggggcctgatcacgctgaccaccattggctacggggacaagtacccccagacctggaacggcaggctccttgcggcaaccttcaccctcatcggtgtctccttcttcgcgctgcctgcaggcatcttggggtctgggtttgccctgaaggttcaggagcagcacaggcagaagcactttgagaagaggcggaacccggcagcaggcctgatccagtcggcctggagattctacgccaccaacctctcgcgcacagacctgcactccacgtggcagtactacgagcgaacggtcaccgtgcccatgtacagttcgcaaactcaaacctacggggcctccagacttatccccccgctgaaccagctggagctgctgaggaacctcaagagtaaatctggactcgctttcaggaaggaccccccgccggagccgtctccaagccagaaggtcagtttgaaagatcgtgtcttctccagcccccgaggcgtggctgccaaggggaaggggtccccgcaggcccagactgtgaggcggtcacccagcgccgaccagagcctcgaggacagccccagcaaggtgcccaagagctggagcttcggggaccgcagccgggcacgccaggctttccgcatcaagggtgccgcgtcacggcagaactcagaagaagcaagcctccccggagaggacattgtggatgacaagagctgcccctgcgagtttgtgaccgaggacctgaccccgggcctcaaagtcagcatcagagccgtgtgtgtcatgcggttcctggtgtccaagcggaagttcaaggagagcctgcggccctacgacgtgatggacgtcatcgagcagtactcagccggccacctggacatgctgtcccgaattaagagcctgcagtccaggatagatatgattgtgggtcccccgcccccttcaactccccggcacaagaagtaccccaccaaaggacccacggcccctccgagagagtcaccccagtactcacctagagtggaccagatcgtggggcggggcccagcgatcacggacaaggaccgcaccaagggcccggccgaggcggagctgcccgaggaccccagcatgatgggacggctcgggaaggtggagaagcaggtcttgtccatggagaagaagctggacttcctggtgaatatctacatgcagcggatgggcatccccccgacagagaccgaggcctactttggggccaaagagccggagccggcgccgccgtaccacagcccggaagacagccgggagcatgtcgacaggcacggctgcattgtcaagatcgtgcgctccagcagctccacgggccagaagaacttctcggcgcccccggccgcgccccctgtccagtgtccgccctccacctcctggcagccacagagccacccgcgccagggccacggcacctcccccgtgggggaccacggctccctggtgcgcatcccgccgccgcctgcccacgagcggtcgctgtccgcctacggcgggggcaaccgcgccagcatggagttcctgcggcaggaggacaccccgggctgcaggccccccgaggggaacctgcgggacagcgacacgtccatctccatcccgtccgtggaccacgaggagctggagcgttccttcagcggcttcagcatctcccagtccaaggagaacctggatgctctcaacagctgctacgcggccgtggcgccttgtgccaaagtcaggccctacattgcggagggagagtcagacaccgactccgacctctgtaccccgtgcgggcccccgccacgctcggccaccggcgagggtccctttggtgacgtgggctgggccgggcccaggaagtgaggcggcgctgggccagtggacccgcccgcggccctcctcagcacggtgcctccgaggttttgaggcgggaaccctctggggcccttttcttacagtaactgagtgtggcgggaagggtgggccctggaggggcccatgtgggctgaaggatgggggctcctggcagtgaccttttacaaaagttattttccaacaggggctggagggctgggcagggccctgtggctccaggagcagcgtgcaggagcaaggctgccctgtccactctgctcagggccgcggccgacatcagcccggtgtgaggaggggcgggagtgatgacggggtgttgccagcgtggcaacaggcggggggttgtctcagccgagcccaggggaggcacaaagggcaggcctgttccctgaggacctgcgcaaagggcgggcctgtttggtgaggacctgcggccttgggtcccggtggggtttccgggcagctacaggcgggtgtggccggccgctgtgcgtggcctctgccttcacacctgacctgcccggcgggctttcctgttccccacctcaggggcgcccaaatacagagctattggttggcgtcttctccctgtaccttctgggatctgagggctctttccatggaagccagccccgaggtggagaccttcgcctgcagccgaggagcgggtggggcctgggaaccaaactggagccagagtggacgtccagccctctggtcttggcctccagagggagggcctggctcacggtggggccagggagccggctccaaagggtcttcaaaaagggggtccttgggggctccagctgcctcgccctggcctttctgtgggtgcgtgagagccagcagcaccccagccttggagaccgggggggcaggaccccaagtcctcccctctctcctgactgccctggccgggtgccggcactgcgagacccacctggtgagcaggcctcacagttcttagccagggccccacctcgcctgtgtcccaccagtgccccgacagacctggggcagggctgggccatgatgcagcgggccaggatagcctccaccgtcagcacagggccgccctccccgcctttccggaggaaaccactcccacctcagcccagctgtgcgccctccctagctctcctgccccctggagctgatggccccttctccactgaccgattccttagcggggcctcttggggtctcgggcctcgggtgcaccgtcccatgcccgtcctgttgtgggcaccgtggcccttggggcaggcggctctaatgcgggagcgagtccctagctccagacttaagaaccagaccccgggagcatctggcatttggcgtgacggcgtcgcaggcgggcctgggctccctggagagtggcctccctgggagtgagcagggctggggtcgtgggcgcaaatactcctgcagagcaagtgcaggggagtcctgggcccgtttctcctccacctgcgttttcagtgcacttggcttggctgggaggtcctgaggccctgaggccagcaggggaaccagtcctgagggagaggactttgaaagcagcatttgagggtcgtacgcccctggctggtgggggtcctggcgctcagggtgttcggggagccatgtctggcgtccattgtggggagctgctgccctggcctctctgcctacccccagcccggccagggcactcccaggccctgtcgccattgaggtgcctccgctgggctgtctcctcacccctccctgtgctggagcctgtcccaaaaaggtgccaactgggaggcctcggaagccactgtccaggctcccactgcctgtctgctctgttcccaaaggcagcgtgtgtggcctcgggccctgcggtggcatgaagcatcccttctggtgtgggcatcgctacgtgttttgggggcagcgtttcacggcggtgcccttgctgtctcccttgggctggctcgagcctggggtccatgtccctttgccgtcccgtcatggggcagggaatccatagcggggcccacaggcaggggtatgagtgcgtcccacccaacgcagcaccagccccggccaccgctccccgtgtccccagttccgtctcagctacctggactccaggaccctggagaagggagacctggcagtggagggaggctgtgctgtgtgtccccctgcaggtgtgaccccgcctgctctttcctcccccgccaggtgtggccccgcctgctctttcctcccccaccagtatggccccacctgctctttcctccccccccaaggtgtggccccacctgttctttcctcccctgccgaggtgtgaccccacctgctctttcctccctcccagtatggccccacctgctctttcctcccccgaggtgaggccccgcctgctctttcctcccatggggccgctgaggcatgagcacctgggcacaggttggggctctgcaggatgaggaagacaggccaatcccttccctcccagaagctggccgcccagcaggagggactgaggccagactcatgtccagcaaggaacgtgtggtgtgtcccctgggaagtctctgggccctgggaagagggaaggtgcacgtcctgggatggttgcggggccctgttttgggagacaaaggggtagagggtctgtcttgggcccccccagactctagcctgagcagtgcagccacctactgccccacctcagagaagtgcagcgggaaggaggctggaggtggtgcggcgctgcctcgggtgtctgcgtgaatgagcgtggccaaggaccagtgccacctcatggcaaagagctcccgcagtgtttgttagagtgcacatccctacgtgcccactggcacacacacgtgctcacatacatgtccgcatacaggcgtacacatgcacgcttgcacacatgcacacagaccacatagcacacatgtgcactgaccacacctgtatagaccatgcacagtacacatacgtgcatacacatgcctgcatacaggcatacacatgcacgcttacatgtacacgtgcacagatcacacacatgcacacacgtgtagctcacacacagtatacacatacacaagtgcacagaccacacacagcactaacacatgcacacacaaagtgcataggccacacagcacatgcacacaggtgcacagaccacacagcacacacaagtgcacagagcacactgcacacatgcacacacacacgcgtgcatgcacactcctcgcacttccagccttggagcccttctgtctctggtctttctctttgaccctgctgagtgtaagctgcctggggaggggctacaaggagtaattgtggctttaggggtcgtggtgatgctggaatgtcaagcgccgtcgtggggtatccgactgtccgggctcctggtccgcagtggcagagcgccaggcagagcccaatcagggtctcgtgctgcccttccctcccacagcctggcagccatccagaggaggggctctaccagatgccaaggtgccccggtgtctgtatgggtgtccggttgggtcctgtgtttggtctgccctggaggtgctgggccctcctgggatgggtggctcagcctcgaatcccaggccccagcccaggcaggtgctgctgcctgttgtggtttcctggcccagcttctccttctccctctgcataaaatcacagtccgtgagtcttccagctgccaccacggctgggacacgctgggggagggctcctcccatgcctcctgcacacagccgtctgagcagggcaggtgcccaacaccccccaccggaggacacgctgcccctcagcgatgcccctaccttttggggggcctcgtctcaagcccccccttggaggctgaaatcaccccaggcactgtgagggcttctccagggggcaccctttgagctgtgggtctgatcaccccaagtcccgcccggaggagaggcacagccagggcgtgtggtttaatgtttgcccccttcggggctggaggtctcagtgtttctagattccagaccctgctgccagagagacctgctgccggagagaaggggaggaggactccagctgggctcggtcccccacagtcagggacccccataaaggacacccccttctctctagaaagagctgggctctcagctatttctagttgcttcccagaagccgaggagcagaaggagctgtgagagctttgcagaaacgcccttgtccccgccctcctgagctatgaatgccgtacagagcagaggctggggcattggcaagatcacaggttgatgctgcacagccccattgacacaaaccctcaaagcagacgtgagagggacggttcacaaagctcggacctgccgtggagggtgcccggcagacgtggcgtgagagggacggctcacgaggcttggacctgctgtggagggtgcccagcagacgtggtgtgagaggaacggctcacgagacttggacctggtggagggtgcccagcagacgtggtgtgagagggacggctcacagggcttggacctgccatggagggtgcccggcagacgtggtgtgagagggatggttcacagggcttggacctgccatggagggtgcccggcagatgtggtgggagagagatggctcatgaggcttggacctgccgtggagggtgcccagcagacgtggtatgagagggatggctcacgaggcttggacctggtggagggtgcccggcagacgtgtgagagggacggttcacaaggcttggacctgccatggagggtgcccagcagacgtggtgtgagagggacagctcacgaggcttggacctgctgtggagggtgcccagcagggggctgagctctgaggggtgggtgctcagtgcacgggtgcccccagtgtcctctgatcctgtccggtgcctcccccaacccccacacccatgcagaactcccaggtcacatgcacgtatgtccagggcatgggggtggcgtgaagaggcctggtcagggcctttaggggctgcaggacggaatggccgcctggggagcctgtgtggctgtgccgggcagccatcctgcattcccacccagcgcgcagtctccacctcggccccagcaaagcgctaagcagccggagagacagccagggcggcttcctgaaggatgtgggatggtggactccggggtcgagggaatacgcaggttcctgtccctccgggagacctagagaagctgcacacccaggagctttccatgacccgggagcatgagtgaatgggggttccagtttgctgaactttgccgtcttgtaagggtgggggctgacggccgaccctgggaggaggtgacatcgccgggggaggttgtgggcaacggtggaggaggagagacgggaggggaccatttgggatggaggggcctcttcagagttttaaaaggcgtttgtggggtggagttgagtgtgctctgggcttggacacttgccgtggtgcccctggctggccgaggagactggctctggccaggggccccgtcctgagaggtcctcagcgtctgactctcggccaggcgccagcaaggaggggccggtccccggggctaccaggcaggcacgtgcacatcgccatcgccacacgccaactccgcctgggttttacaaagtcgttgccttaatgcatgtggacaggaactccctgaggtcgccccatgccccctggctgtgccaggtacggacgccctggaccctgcgaacaggtggggcgggcgaggggcccaagggacgggctccagagacacgcgcagggcaggaggggtctcacggaggggtctcgcactgaggcgcccagagctggtggtcccgctggacgccatccctctgcccgggatccacacggcccacgtgtgcccgccatgcccgcgccccacgccattgcagtctgccatcctctggccgtgacggtggctgcagcttccccatttgcgccgttgcctctggctgtctgcacttttgttcatgctccaaagaacatttcataatgccttcagtaccgacgtacacttctgaccattttgtatgtgtccttgtgccgtagtgaccaggcctttttttggtggatgtgttaccccgcacacttcaatctcaactttgtgcaccgtccattttctagggatagacgcccagggaatgaactctagttttctaacagattagctgagatattaacttactcacacggacaggttgatgccagagccgtaagaatgcgccagtgcgggtttgcgggggacttcgggtgtggggtcctgcggccgcgatggccgtggaaggttctggggatccctgctgccacggggacgagttcggacgccaggtggacctgtgcactcagtaaaacgcagtgattcaacctgga

SEQ ID NO: 3033 - RNA, 9163 nt, Homo sapiens
  source 1..9163: mol_type = mRNA
aggcgccgaggtgcgcgcggagcgaggtggccgcagcgtctccgcgcgcggcccaagcccggcaggagtgcggaaccgccgcctcggccatgcggctcccggccggggggcctgggctggggcccgcgccgccccccgcgctccgcccccgctgagcctgagcccgacccggggcgcctcccgccaggcaccatggtgcagaagtcgcgcaacggcggcgtataccccggcccgagcggggagaagaagctgaaggtgggcttcgtggggctggaccccggcgcgcccgactccacccgggacggggcgctgctgatcgccggctccgaggcccccaagcgcggcagcatcctcagcaaacctcgcgcgggcggcgcgggcgccgggaagccccccaagcgcaacgccttctaccgcaagctgcagaatttcctctacaacgtgctggagcggccgcgcggctgggcgttcatctaccacgcctacgtgttcctcctggttttctcctgcctcgtgctgtctgtgttttccaccatcaaggagtatgagaagagctcggagggggccctctacatcctggaaatcgtgactatcgtggtgtttggcgtggagtacttcgtgcggatctgggccgcaggctgctgctgccggtaccgtggctggagggggcggctcaagtttgcccggaaaccgttctgtgtgattgacatcatggtgctcatcgcctccattgcggtgctggccgccggctcccagggcaacgtctttgccacatctgcgctccggagcctgcgcttcctgcagattctgcggatgatccgcatggaccggcggggaggcacctggaagctgctgggctctgtggtctatgcccacagcaaggagctggtcactgcctggtacatcggcttcctttgtctcatcctggcctcgttcctggtgtacttggcagagaagggggagaacgaccactttgacacctacgcggatgcactctggtggggcctgatcacgctgaccaccattggctacggggacaagtacccccagacctggaacggcaggctccttgcggcaaccttcaccctcatcggtgtctccttcttcgcgctgcctgcaggcatcttggggtctgggtttgccctgaaggttcaggagcagcacaggcagaagcactttgagaagaggcggaacccggcagcaggcctgatccagtcggcctggagattctacgccaccaacctctcgcgcacagacctgcactccacgtggcagtactacgagcgaacggtcaccgtgcccatgtacagacttatccccccgctgaaccagctggagctgctgaggaacctcaagagtaaatctggactcgctttcaggaaggaccccccgccggagccgtctccaagccagaaggtcagtttgaaagatcgtgtcttctccagcccccgaggcgtggctgccaaggggaaggggtccccgcaggcccagactgtgaggcggtcacccagcgccgaccagagcctcgaggacagccccagcaaggtgcccaagagctggagcttcggggaccgcagccgggcacgccaggctttccgcatcaagggtgccgcgtcacggcagaactcagaagaagcaagcctccccggagaggacattgtggatgacaagagctgcccctgcgagtttgtgaccgaggacctgaccccgggcctcaaagtcagcatcagagccgtgtgtgtcatgcggttcctggtgtccaagcggaagttcaaggagagcctgcggccctacgacgtgatggacgtcatcgagcagtactcagccggccacctggacatgctgtcccgaattaagagcctgcagtccagagtggaccagatcgtggggcggggcccagcgatcacggacaaggaccgcaccaagggcccggccgaggcggagctgcccgaggaccccagcatgatgggacggctcgggaaggtggagaagcaggtcttgtccatggagaagaagctggacttcctggtgaatatctacatgcagcggatgggcatccccccgacagagaccgaggcctactttggggccaaagagccggagccggcgccgccgtaccacagcccggaagacagccgggagcatgtcgacaggcacggctgcattgtcaagatcgtgcgctccagcagctccacgggccagaagaacttctcggcgcccccggccgcgccccctgtccagtgtccgccctccacctcctggcagccacagagccacccgcgccagggccacggcacctcccccgtgggggaccacggctccctggtgcgcatcccgccgccgcctgcccacgagcggtcgctgtccgcctacggcgggggcaaccgcgccagcatggagttcctgcggcaggaggacaccccgggctgcaggccccccgaggggaacctgcgggacagcgacacgtccatctccatcccgtccgtggaccacgaggagctggagcgttccttcagcggcttcagcatctcccagtccaaggagaacctggatgctctcaacagctgctacgcggccgtggcgccttgtgccaaagtcaggccctacattgcggagggagagtcagacaccgactccgacctctgtaccccgtgcgggcccccgccacgctcggccaccggcgagggtccctttggtgacgtgggctgggccgggcccaggaagtgaggcggcgctgggccagtggacccgcccgcggccctcctcagcacggtgcctccgaggttttgaggcgggaaccctctggggcccttttcttacagtaactgagtgtggcgggaagggtgggccctggaggggcccatgtgggctgaaggatgggggctcctggcagtgaccttttacaaaagttattttccaacaggggctggagggctgggcagggccctgtggctccaggagcagcgtgcaggagcaaggctgccctgtccactctgctcagggccgcggccgacatcagcccggtgtgaggaggggcgggagtgatgacggggtgttgccagcgtggcaacaggcggggggttgtctcagccgagcccaggggaggcacaaagggcaggcctgttccctgaggacctgcgcaaagggcgggcctgtttggtgaggacctgcggccttgggtcccggtggggtttccgggcagctacaggcgggtgtggccggccgctgtgcgtggcctctgccttcacacctgacctgcccggcgggctttcctgttccccacctcaggggcgcccaaatacagagctattggttggcgtcttctccctgtaccttctgggatctgagggctctttccatggaagccagccccgaggtggagaccttcgcctgcagccgaggagcgggtggggcctgggaaccaaactggagccagagtggacgtccagccctctggtcttggcctccagagggagggcctggctcacggtggggccagggagccggctccaaagggtcttcaaaaagggggtccttgggggctccagctgcctcgccctggcctttctgtgggtgcgtgagagccagcagcaccccagccttggagaccgggggggcaggaccccaagtcctcccctctctcctgactgccctggccgggtgccggcactgcgagacccacctggtgagcaggcctcacagttcttagccagggccccacctcgcctgtgtcccaccagtgccccgacagacctggggcagggctgggccatgatgcagcgggccaggatagcctccaccgtcagcacagggccgccctccccgcctttccggaggaaaccactcccacctcagcccagctgtgcgccctccctagctctcctgccccctggagctgatggccccttctccactgaccgattccttagcggggcctcttggggtctcgggcctcgggtgcaccgtcccatgcccgtcctgttgtgggcaccgtggcccttggggcaggcggctctaatgcgggagcgagtccctagctccagacttaagaaccagaccccgggagcatctggcatttggcgtgacggcgtcgcaggcgggcctgggctccctggagagtggcctccctgggagtgagcagggctggggtcgtgggcgcaaatactcctgcagagcaagtgcaggggagtcctgggcccgtttctcctccacctgcgttttcagtgcacttggcttggctgggaggtcctgaggccctgaggccagcaggggaaccagtcctgagggagaggactttgaaagcagcatttgagggtcgtacgcccctggctggtgggggtcctggcgctcagggtgttcggggagccatgtctggcgtccattgtggggagctgctgccctggcctctctgcctacccccagcccggccagggcactcccaggccctgtcgccattgaggtgcctccgctgggctgtctcctcacccctccctgtgctggagcctgtcccaaaaaggtgccaactgggaggcctcggaagccactgtccaggctcccactgcctgtctgctctgttcccaaaggcagcgtgtgtggcctcgggccctgcggtggcatgaagcatcccttctggtgtgggcatcgctacgtgttttgggggcagcgtttcacggcggtgcccttgctgtctcccttgggctggctcgagcctggggtccatgtccctttgccgtcccgtcatggggcagggaatccatagcggggcccacaggcaggggtatgagtgcgtcccacccaacgcagcaccagccccggccaccgctccccgtgtccccagttccgtctcagctacctggactccaggaccctggagaagggagacctggcagtggagggaggctgtgctgtgtgtccccctgcaggtgtgaccccgcctgctctttcctcccccgccaggtgtggccccgcctgctctttcctcccccaccagtatggccccacctgctctttcctccccccccaaggtgtggccccacctgttctttcctcccctgccgaggtgtgaccccacctgctctttcctccctcccagtatggccccacctgctctttcctcccccgaggtgaggccccgcctgctctttcctcccatggggccgctgaggcatgagcacctgggcacaggttggggctctgcaggatgaggaagacaggccaatcccttccctcccagaagctggccgcccagcaggagggactgaggccagactcatgtccagcaaggaacgtgtggtgtgtcccctgggaagtctctgggccctgggaagagggaaggtgcacgtcctgggatggttgcggggccctgttttgggagacaaaggggtagagggtctgtcttgggcccccccagactctagcctgagcagtgcagccacctactgccccacctcagagaagtgcagcgggaaggaggctggaggtggtgcggcgctgcctcgggtgtctgcgtgaatgagcgtggccaaggaccagtgccacctcatggcaaagagctcccgcagtgtttgttagagtgcacatccctacgtgcccactggcacacacacgtgctcacatacatgtccgcatacaggcgtacacatgcacgcttgcacacatgcacacagaccacatagcacacatgtgcactgaccacacctgtatagaccatgcacagtacacatacgtgcatacacatgcctgcatacaggcatacacatgcacgcttacatgtacacgtgcacagatcacacacatgcacacacgtgtagctcacacacagtatacacatacacaagtgcacagaccacacacagcactaacacatgcacacacaaagtgcataggccacacagcacatgcacacaggtgcacagaccacacagcacacacaagtgcacagagcacactgcacacatgcacacacacacgcgtgcatgcacactcctcgcacttccagccttggagcccttctgtctctggtctttctctttgaccctgctgagtgtaagctgcctggggaggggctacaaggagtaattgtggctttaggggtcgtggtgatgctggaatgtcaagcgccgtcgtggggtatccgactgtccgggctcctggtccgcagtggcagagcgccaggcagagcccaatcagggtctcgtgctgcccttccctcccacagcctggcagccatccagaggaggggctctaccagatgccaaggtgccccggtgtctgtatgggtgtccggttgggtcctgtgtttggtctgccctggaggtgctgggccctcctgggatgggtggctcagcctcgaatcccaggccccagcccaggcaggtgctgctgcctgttgtggtttcctggcccagcttctccttctccctctgcataaaatcacagtccgtgagtcttccagctgccaccacggctgggacacgctgggggagggctcctcccatgcctcctgcacacagccgtctgagcagggcaggtgcccaacaccccccaccggaggacacgctgcccctcagcgatgcccctaccttttggggggcctcgtctcaagcccccccttggaggctgaaatcaccccaggcactgtgagggcttctccagggggcaccctttgagctgtgggtctgatcaccccaagtcccgcccggaggagaggcacagccagggcgtgtggtttaatgtttgcccccttcggggctggaggtctcagtgtttctagattccagaccctgctgccagagagacctgctgccggagagaaggggaggaggactccagctgggctcggtcccccacagtcagggacccccataaaggacacccccttctctctagaaagagctgggctctcagctatttctagttgcttcccagaagccgaggagcagaaggagctgtgagagctttgcagaaacgcccttgtccccgccctcctgagctatgaatgccgtacagagcagaggctggggcattggcaagatcacaggttgatgctgcacagccccattgacacaaaccctcaaagcagacgtgagagggacggttcacaaagctcggacctgccgtggagggtgcccggcagacgtggcgtgagagggacggctcacgaggcttggacctgctgtggagggtgcccagcagacgtggtgtgagaggaacggctcacgagacttggacctggtggagggtgcccagcagacgtggtgtgagagggacggctcacagggcttggacctgccatggagggtgcccggcagacgtggtgtgagagggatggttcacagggcttggacctgccatggagggtgcccggcagatgtggtgggagagagatggctcatgaggcttggacctgccgtggagggtgcccagcagacgtggtatgagagggatggctcacgaggcttggacctggtggagggtgcccggcagacgtgtgagagggacggttcacaaggcttggacctgccatggagggtgcccagcagacgtggtgtgagagggacagctcacgaggcttggacctgctgtggagggtgcccagcagggggctgagctctgaggggtgggtgctcagtgcacgggtgcccccagtgtcctctgatcctgtccggtgcctcccccaacccccacacccatgcagaactcccaggtcacatgcacgtatgtccagggcatgggggtggcgtgaagaggcctggtcagggcctttaggggctgcaggacggaatggccgcctggggagcctgtgtggctgtgccgggcagccatcctgcattcccacccagcgcgcagtctccacctcggccccagcaaagcgctaagcagccggagagacagccagggcggcttcctgaaggatgtgggatggtggactccggggtcgagggaatacgcaggttcctgtccctccgggagacctagagaagctgcacacccaggagctttccatgacccgggagcatgagtgaatgggggttccagtttgctgaactttgccgtcttgtaagggtgggggctgacggccgaccctgggaggaggtgacatcgccgggggaggttgtgggcaacggtggaggaggagagacgggaggggaccatttgggatggaggggcctcttcagagttttaaaaggcgtttgtggggtggagttgagtgtgctctgggcttggacacttgccgtggtgcccctggctggccgaggagactggctctggccaggggccccgtcctgagaggtcctcagcgtctgactctcggccaggcgccagcaaggaggggccggtccccggggctaccaggcaggcacgtgcacatcgccatcgccacacgccaactccgcctgggttttacaaagtcgttgccttaatgcatgtggacaggaactccctgaggtcgccccatgccccctggctgtgccaggtacggacgccctggaccctgcgaacaggtggggcgggcgaggggcccaagggacgggctccagagacacgcgcagggcaggaggggtctcacggaggggtctcgcactgaggcgcccagagctggtggtcccgctggacgccatccctctgcccgggatccacacggcccacgtgtgcccgccatgcccgcgccccacgccattgcagtctgccatcctctggccgtgacggtggctgcagcttccccatttgcgccgttgcctctggctgtctgcacttttgttcatgctccaaagaacatttcataatgccttcagtaccgacgtacacttctgaccattttgtatgtgtccttgtgccgtagtgaccaggcctttttttggtggatgtgttaccccgcacacttcaatctcaactttgtgcaccgtccattttctagggatagacgcccagggaatgaactctagttttctaacagattagctgagatattaacttactcacacggacaggttgatgccagagccgtaagaatgcgccagtgcgggtttgcgggggacttcgggtgtggggtcctgcggccgcgatggccgtggaaggttctggggatccctgctgccacggggacgagttcggacgccaggtggacctgtgcactcagtaaaacgcagtgattcaacctgga

SEQ ID NO: 3034 - RNA, 9193 nt, Homo sapiens
  source 1..9193: mol_type = mRNA
aggcgccgaggtgcgcgcggagcgaggtggccgcagcgtctccgcgcgcggcccaagcccggcaggagtgcggaaccgccgcctcggccatgcggctcccggccggggggcctgggctggggcccgcgccgccccccgcgctccgcccccgctgagcctgagcccgacccggggcgcctcccgccaggcaccatggtgcagaagtcgcgcaacggcggcgtataccccggcccgagcggggagaagaagctgaaggtgggcttcgtggggctggaccccggcgcgcccgactccacccgggacggggcgctgctgatcgccggctccgaggcccccaagcgcggcagcatcctcagcaaacctcgcgcgggcggcgcgggcgccgggaagccccccaagcgcaacgccttctaccgcaagctgcagaatttcctctacaacgtgctggagcggccgcgcggctgggcgttcatctaccacgcctacgtgttcctcctggttttctcctgcctcgtgctgtctgtgttttccaccatcaaggagtatgagaagagctcggagggggccctctacatcctggaaatcgtgactatcgtggtgtttggcgtggagtacttcgtgcggatctgggccgcaggctgctgctgccggtaccgtggctggagggggcggctcaagtttgcccggaaaccgttctgtgtgattgacatcatggtgctcatcgcctccattgcggtgctggccgccggctcccagggcaacgtctttgccacatctgcgctccggagcctgcgcttcctgcagattctgcggatgatccgcatggaccggcggggaggcacctggaagctgctgggctctgtggtctatgcccacagcaaggagctggtcactgcctggtacatcggcttcctttgtctcatcctggcctcgttcctggtgtacttggcagagaagggggagaacgaccactttgacacctacgcggatgcactctggtggggcctgatcacgctgaccaccattggctacggggacaagtacccccagacctggaacggcaggctccttgcggcaaccttcaccctcatcggtgtctccttcttcgcgctgcctgcaggcatcttggggtctgggtttgccctgaaggttcaggagcagcacaggcagaagcactttgagaagaggcggaacccggcagcaggcctgatccagtcggcctggagattctacgccaccaacctctcgcgcacagacctgcactccacgtggcagtactacgagcgaacggtcaccgtgcccatgtacagttcgcaaactcaaacctacggggcctccagacttatccccccgctgaaccagctggagctgctgaggaacctcaagagtaaatctggactcgctttcaggaaggaccccccgccggagccgtctccaagccagaaggtcagtttgaaagatcgtgtcttctccagcccccgaggcgtggctgccaaggggaaggggtccccgcaggcccagactgtgaggcggtcacccagcgccgaccagagcctcgaggacagccccagcaaggtgcccaagagctggagcttcggggaccgcagccgggcacgccaggctttccgcatcaagggtgccgcgtcacggcagaactcagaagaagcaagcctccccggagaggacattgtggatgacaagagctgcccctgcgagtttgtgaccgaggacctgaccccgggcctcaaagtcagcatcagagccgtgtgtgtcatgcggttcctggtgtccaagcggaagttcaaggagagcctgcggccctacgacgtgatggacgtcatcgagcagtactcagccggccacctggacatgctgtcccgaattaagagcctgcagtccagagtggaccagatcgtggggcggggcccagcgatcacggacaaggaccgcaccaagggcccggccgaggcggagctgcccgaggaccccagcatgatgggacggctcgggaaggtggagaagcaggtcttgtccatggagaagaagctggacttcctggtgaatatctacatgcagcggatgggcatccccccgacagagaccgaggcctactttggggccaaagagccggagccggcgccgccgtaccacagcccggaagacagccgggagcatgtcgacaggcacggctgcattgtcaagatcgtgcgctccagcagctccacgggccagaagaacttctcggcgcccccggccgcgccccctgtccagtgtccgccctccacctcctggcagccacagagccacccgcgccagggccacggcacctcccccgtgggggaccacggctccctggtgcgcatcccgccgccgcctgcccacgagcggtcgctgtccgcctacggcgggggcaaccgcgccagcatggagttcctgcggcaggaggacaccccgggctgcaggccccccgaggggaacctgcgggacagcgacacgtccatctccatcccgtccgtggaccacgaggagctggagcgttccttcagcggcttcagcatctcccagtccaaggagaacctggatgctctcaacagctgctacgcggccgtggcgccttgtgccaaagtcaggccctacattgcggagggagagtcagacaccgactccgacctctgtaccccgtgcgggcccccgccacgctcggccaccggcgagggtccctttggtgacgtgggctgggccgggcccaggaagtgaggcggcgctgggccagtggacccgcccgcggccctcctcagcacggtgcctccgaggttttgaggcgggaaccctctggggcccttttcttacagtaactgagtgtggcgggaagggtgggccctggaggggcccatgtgggctgaaggatgggggctcctggcagtgaccttttacaaaagttattttccaacaggggctggagggctgggcagggccctgtggctccaggagcagcgtgcaggagcaaggctgccctgtccactctgctcagggccgcggccgacatcagcccggtgtgaggaggggcgggagtgatgacggggtgttgccagcgtggcaacaggcggggggttgtctcagccgagcccaggggaggcacaaagggcaggcctgttccctgaggacctgcgcaaagggcgggcctgtttggtgaggacctgcggccttgggtcccggtggggtttccgggcagctacaggcgggtgtggccggccgctgtgcgtggcctctgccttcacacctgacctgcccggcgggctttcctgttccccacctcaggggcgcccaaatacagagctattggttggcgtcttctccctgtaccttctgggatctgagggctctttccatggaagccagccccgaggtggagaccttcgcctgcagccgaggagcgggtggggcctgggaaccaaactggagccagagtggacgtccagccctctggtcttggcctccagagggagggcctggctcacggtggggccagggagccggctccaaagggtcttcaaaaagggggtccttgggggctccagctgcctcgccctggcctttctgtgggtgcgtgagagccagcagcaccccagccttggagaccgggggggcaggaccccaagtcctcccctctctcctgactgccctggccgggtgccggcactgcgagacccacctggtgagcaggcctcacagttcttagccagggccccacctcgcctgtgtcccaccagtgccccgacagacctggggcagggctgggccatgatgcagcgggccaggatagcctccaccgtcagcacagggccgccctccccgcctttccggaggaaaccactcccacctcagcccagctgtgcgccctccctagctctcctgccccctggagctgatggccccttctccactgaccgattccttagcggggcctcttggggtctcgggcctcgggtgcaccgtcccatgcccgtcctgttgtgggcaccgtggcccttggggcaggcggctctaatgcgggagcgagtccctagctccagacttaagaaccagaccccgggagcatctggcatttggcgtgacggcgtcgcaggcgggcctgggctccctggagagtggcctccctgggagtgagcagggctggggtcgtgggcgcaaatactcctgcagagcaagtgcaggggagtcctgggcccgtttctcctccacctgcgttttcagtgcacttggcttggctgggaggtcctgaggccctgaggccagcaggggaaccagtcctgagggagaggactttgaaagcagcatttgagggtcgtacgcccctggctggtgggggtcctggcgctcagggtgttcggggagccatgtctggcgtccattgtggggagctgctgccctggcctctctgcctacccccagcccggccagggcactcccaggccctgtcgccattgaggtgcctccgctgggctgtctcctcacccctccctgtgctggagcctgtcccaaaaaggtgccaactgggaggcctcggaagccactgtccaggctcccactgcctgtctgctctgttcccaaaggcagcgtgtgtggcctcgggccctgcggtggcatgaagcatcccttctggtgtgggcatcgctacgtgttttgggggcagcgtttcacggcggtgcccttgctgtctcccttgggctggctcgagcctggggtccatgtccctttgccgtcccgtcatggggcagggaatccatagcggggcccacaggcaggggtatgagtgcgtcccacccaacgcagcaccagccccggccaccgctccccgtgtccccagttccgtctcagctacctggactccaggaccctggagaagggagacctggcagtggagggaggctgtgctgtgtgtccccctgcaggtgtgaccccgcctgctctttcctcccccgccaggtgtggccccgcctgctctttcctcccccaccagtatggccccacctgctctttcctccccccccaaggtgtggccccacctgttctttcctcccctgccgaggtgtgaccccacctgctctttcctccctcccagtatggccccacctgctctttcctcccccgaggtgaggccccgcctgctctttcctcccatggggccgctgaggcatgagcacctgggcacaggttggggctctgcaggatgaggaagacaggccaatcccttccctcccagaagctggccgcccagcaggagggactgaggccagactcatgtccagcaaggaacgtgtggtgtgtcccctgggaagtctctgggccctgggaagagggaaggtgcacgtcctgggatggttgcggggccctgttttgggagacaaaggggtagagggtctgtcttgggcccccccagactctagcctgagcagtgcagccacctactgccccacctcagagaagtgcagcgggaaggaggctggaggtggtgcggcgctgcctcgggtgtctgcgtgaatgagcgtggccaaggaccagtgccacctcatggcaaagagctcccgcagtgtttgttagagtgcacatccctacgtgcccactggcacacacacgtgctcacatacatgtccgcatacaggcgtacacatgcacgcttgcacacatgcacacagaccacatagcacacatgtgcactgaccacacctgtatagaccatgcacagtacacatacgtgcatacacatgcctgcatacaggcatacacatgcacgcttacatgtacacgtgcacagatcacacacatgcacacacgtgtagctcacacacagtatacacatacacaagtgcacagaccacacacagcactaacacatgcacacacaaagtgcataggccacacagcacatgcacacaggtgcacagaccacacagcacacacaagtgcacagagcacactgcacacatgcacacacacacgcgtgcatgcacactcctcgcacttccagccttggagcccttctgtctctggtctttctctttgaccctgctgagtgtaagctgcctggggaggggctacaaggagtaattgtggctttaggggtcgtggtgatgctggaatgtcaagcgccgtcgtggggtatccgactgtccgggctcctggtccgcagtggcagagcgccaggcagagcccaatcagggtctcgtgctgcccttccctcccacagcctggcagccatccagaggaggggctctaccagatgccaaggtgccccggtgtctgtatgggtgtccggttgggtcctgtgtttggtctgccctggaggtgctgggccctcctgggatgggtggctcagcctcgaatcccaggccccagcccaggcaggtgctgctgcctgttgtggtttcctggcccagcttctccttctccctctgcataaaatcacagtccgtgagtcttccagctgccaccacggctgggacacgctgggggagggctcctcccatgcctcctgcacacagccgtctgagcagggcaggtgcccaacaccccccaccggaggacacgctgcccctcagcgatgcccctaccttttggggggcctcgtctcaagcccccccttggaggctgaaatcaccccaggcactgtgagggcttctccagggggcaccctttgagctgtgggtctgatcaccccaagtcccgcccggaggagaggcacagccagggcgtgtggtttaatgtttgcccccttcggggctggaggtctcagtgtttctagattccagaccctgctgccagagagacctgctgccggagagaaggggaggaggactccagctgggctcggtcccccacagtcagggacccccataaaggacacccccttctctctagaaagagctgggctctcagctatttctagttgcttcccagaagccgaggagcagaaggagctgtgagagctttgcagaaacgcccttgtccccgccctcctgagctatgaatgccgtacagagcagaggctggggcattggcaagatcacaggttgatgctgcacagccccattgacacaaaccctcaaagcagacgtgagagggacggttcacaaagctcggacctgccgtggagggtgcccggcagacgtggcgtgagagggacggctcacgaggcttggacctgctgtggagggtgcccagcagacgtggtgtgagaggaacggctcacgagacttggacctggtggagggtgcccagcagacgtggtgtgagagggacggctcacagggcttggacctgccatggagggtgcccggcagacgtggtgtgagagggatggttcacagggcttggacctgccatggagggtgcccggcagatgtggtgggagagagatggctcatgaggcttggacctgccgtggagggtgcccagcagacgtggtatgagagggatggctcacgaggcttggacctggtggagggtgcccggcagacgtgtgagagggacggttcacaaggcttggacctgccatggagggtgcccagcagacgtggtgtgagagggacagctcacgaggcttggacctgctgtggagggtgcccagcagggggctgagctctgaggggtgggtgctcagtgcacgggtgcccccagtgtcctctgatcctgtccggtgcctcccccaacccccacacccatgcagaactcccaggtcacatgcacgtatgtccagggcatgggggtggcgtgaagaggcctggtcagggcctttaggggctgcaggacggaatggccgcctggggagcctgtgtggctgtgccgggcagccatcctgcattcccacccagcgcgcagtctccacctcggccccagcaaagcgctaagcagccggagagacagccagggcggcttcctgaaggatgtgggatggtggactccggggtcgagggaatacgcaggttcctgtccctccgggagacctagagaagctgcacacccaggagctttccatgacccgggagcatgagtgaatgggggttccagtttgctgaactttgccgtcttgtaagggtgggggctgacggccgaccctgggaggaggtgacatcgccgggggaggttgtgggcaacggtggaggaggagagacgggaggggaccatttgggatggaggggcctcttcagagttttaaaaggcgtttgtggggtggagttgagtgtgctctgggcttggacacttgccgtggtgcccctggctggccgaggagactggctctggccaggggccccgtcctgagaggtcctcagcgtctgactctcggccaggcgccagcaaggaggggccggtccccggggctaccaggcaggcacgtgcacatcgccatcgccacacgccaactccgcctgggttttacaaagtcgttgccttaatgcatgtggacaggaactccctgaggtcgccccatgccccctggctgtgccaggtacggacgccctggaccctgcgaacaggtggggcgggcgaggggcccaagggacgggctccagagacacgcgcagggcaggaggggtctcacggaggggtctcgcactgaggcgcccagagctggtggtcccgctggacgccatccctctgcccgggatccacacggcccacgtgtgcccgccatgcccgcgccccacgccattgcagtctgccatcctctggccgtgacggtggctgcagcttccccatttgcgccgttgcctctggctgtctgcacttttgttcatgctccaaagaacatttcataatgccttcagtaccgacgtacacttctgaccattttgtatgtgtccttgtgccgtagtgaccaggcctttttttggtggatgtgttaccccgcacacttcaatctcaactttgtgcaccgtccattttctagggatagacgcccagggaatgaactctagttttctaacagattagctgagatattaacttactcacacggacaggttgatgccagagccgtaagaatgcgccagtgcgggtttgcgggggacttcgggtgtggggtcctgcggccgcgatggccgtggaaggttctggggatccctgctgccacggggacgagttcggacgccaggtggacctgtgcactcagtaaaacgcagtgattcaacctgga

SEQ ID NO: 3035 - RNA, 9247 nt, Homo sapiens
  source 1..9247: mol_type = mRNA
aggcgccgaggtgcgcgcggagcgaggtggccgcagcgtctccgcgcgcggcccaagcccggcaggagtgcggaaccgccgcctcggccatgcggctcccggccggggggcctgggctggggcccgcgccgccccccgcgctccgcccccgctgagcctgagcccgacccggggcgcctcccgccaggcaccatggtgcagaagtcgcgcaacggcggcgtataccccggcccgagcggggagaagaagctgaaggtgggcttcgtggggctggaccccggcgcgcccgactccacccgggacggggcgctgctgatcgccggctccgaggcccccaagcgcggcagcatcctcagcaaacctcgcgcgggcggcgcgggcgccgggaagccccccaagcgcaacgccttctaccgcaagctgcagaatttcctctacaacgtgctggagcggccgcgcggctgggcgttcatctaccacgcctacgtgttcctcctggttttctcctgcctcgtgctgtctgtgttttccaccatcaaggagtatgagaagagctcggagggggccctctacatcctggaaatcgtgactatcgtggtgtttggcgtggagtacttcgtgcggatctgggccgcaggctgctgctgccggtaccgtggctggagggggcggctcaagtttgcccggaaaccgttctgtgtgattgacatcatggtgctcatcgcctccattgcggtgctggccgccggctcccagggcaacgtctttgccacatctgcgctccggagcctgcgcttcctgcagattctgcggatgatccgcatggaccggcggggaggcacctggaagctgctgggctctgtggtctatgcccacagcaaggagctggtcactgcctggtacatcggcttcctttgtctcatcctggcctcgttcctggtgtacttggcagagaagggggagaacgaccactttgacacctacgcggatgcactctggtggggcctgatcacgctgaccaccattggctacggggacaagtacccccagacctggaacggcaggctccttgcggcaaccttcaccctcatcggtgtctccttcttcgcgctgcctgcaggcatcttggggtctgggtttgccctgaaggttcaggagcagcacaggcagaagcactttgagaagaggcggaacccggcagcaggcctgatccagtcggcctggagattctacgccaccaacctctcgcgcacagacctgcactccacgtggcagtactacgagcgaacggtcaccgtgcccatgtacagttcgcaaactcaaacctacggggcctccagacttatccccccgctgaaccagctggagctgctgaggaacctcaagagtaaatctggactcgctttcaggaaggaccccccgccggagccgtctccaagtaaaggcagcccgtgcagagggcccctgtgtggatgctgccccggacgctctagccagaaggtcagtttgaaagatcgtgtcttctccagcccccgaggcgtggctgccaaggggaaggggtccccgcaggcccagactgtgaggcggtcacccagcgccgaccagagcctcgaggacagccccagcaaggtgcccaagagctggagcttcggggaccgcagccgggcacgccaggctttccgcatcaagggtgccgcgtcacggcagaactcagaagaagcaagcctccccggagaggacattgtggatgacaagagctgcccctgcgagtttgtgaccgaggacctgaccccgggcctcaaagtcagcatcagagccgtgtgtgtcatgcggttcctggtgtccaagcggaagttcaaggagagcctgcggccctacgacgtgatggacgtcatcgagcagtactcagccggccacctggacatgctgtcccgaattaagagcctgcagtccagagtggaccagatcgtggggcggggcccagcgatcacggacaaggaccgcaccaagggcccggccgaggcggagctgcccgaggaccccagcatgatgggacggctcgggaaggtggagaagcaggtcttgtccatggagaagaagctggacttcctggtgaatatctacatgcagcggatgggcatccccccgacagagaccgaggcctactttggggccaaagagccggagccggcgccgccgtaccacagcccggaagacagccgggagcatgtcgacaggcacggctgcattgtcaagatcgtgcgctccagcagctccacgggccagaagaacttctcggcgcccccggccgcgccccctgtccagtgtccgccctccacctcctggcagccacagagccacccgcgccagggccacggcacctcccccgtgggggaccacggctccctggtgcgcatcccgccgccgcctgcccacgagcggtcgctgtccgcctacggcgggggcaaccgcgccagcatggagttcctgcggcaggaggacaccccgggctgcaggccccccgaggggaacctgcgggacagcgacacgtccatctccatcccgtccgtggaccacgaggagctggagcgttccttcagcggcttcagcatctcccagtccaaggagaacctggatgctctcaacagctgctacgcggccgtggcgccttgtgccaaagtcaggccctacattgcggagggagagtcagacaccgactccgacctctgtaccccgtgcgggcccccgccacgctcggccaccggcgagggtccctttggtgacgtgggctgggccgggcccaggaagtgaggcggcgctgggccagtggacccgcccgcggccctcctcagcacggtgcctccgaggttttgaggcgggaaccctctggggcccttttcttacagtaactgagtgtggcgggaagggtgggccctggaggggcccatgtgggctgaaggatgggggctcctggcagtgaccttttacaaaagttattttccaacaggggctggagggctgggcagggccctgtggctccaggagcagcgtgcaggagcaaggctgccctgtccactctgctcagggccgcggccgacatcagcccggtgtgaggaggggcgggagtgatgacggggtgttgccagcgtggcaacaggcggggggttgtctcagccgagcccaggggaggcacaaagggcaggcctgttccctgaggacctgcgcaaagggcgggcctgtttggtgaggacctgcggccttgggtcccggtggggtttccgggcagctacaggcgggtgtggccggccgctgtgcgtggcctctgccttcacacctgacctgcccggcgggctttcctgttccccacctcaggggcgcccaaatacagagctattggttggcgtcttctccctgtaccttctgggatctgagggctctttccatggaagccagccccgaggtggagaccttcgcctgcagccgaggagcgggtggggcctgggaaccaaactggagccagagtggacgtccagccctctggtcttggcctccagagggagggcctggctcacggtggggccagggagccggctccaaagggtcttcaaaaagggggtccttgggggctccagctgcctcgccctggcctttctgtgggtgcgtgagagccagcagcaccccagccttggagaccgggggggcaggaccccaagtcctcccctctctcctgactgccctggccgggtgccggcactgcgagacccacctggtgagcaggcctcacagttcttagccagggccccacctcgcctgtgtcccaccagtgccccgacagacctggggcagggctgggccatgatgcagcgggccaggatagcctccaccgtcagcacagggccgccctccccgcctttccggaggaaaccactcccacctcagcccagctgtgcgccctccctagctctcctgccccctggagctgatggccccttctccactgaccgattccttagcggggcctcttggggtctcgggcctcgggtgcaccgtcccatgcccgtcctgttgtgggcaccgtggcccttggggcaggcggctctaatgcgggagcgagtccctagctccagacttaagaaccagaccccgggagcatctggcatttggcgtgacggcgtcgcaggcgggcctgggctccctggagagtggcctccctgggagtgagcagggctggggtcgtgggcgcaaatactcctgcagagcaagtgcaggggagtcctgggcccgtttctcctccacctgcgttttcagtgcacttggcttggctgggaggtcctgaggccctgaggccagcaggggaaccagtcctgagggagaggactttgaaagcagcatttgagggtcgtacgcccctggctggtgggggtcctggcgctcagggtgttcggggagccatgtctggcgtccattgtggggagctgctgccctggcctctctgcctacccccagcccggccagggcactcccaggccctgtcgccattgaggtgcctccgctgggctgtctcctcacccctccctgtgctggagcctgtcccaaaaaggtgccaactgggaggcctcggaagccactgtccaggctcccactgcctgtctgctctgttcccaaaggcagcgtgtgtggcctcgggccctgcggtggcatgaagcatcccttctggtgtgggcatcgctacgtgttttgggggcagcgtttcacggcggtgcccttgctgtctcccttgggctggctcgagcctggggtccatgtccctttgccgtcccgtcatggggcagggaatccatagcggggcccacaggcaggggtatgagtgcgtcccacccaacgcagcaccagccccggccaccgctccccgtgtccccagttccgtctcagctacctggactccaggaccctggagaagggagacctggcagtggagggaggctgtgctgtgtgtccccctgcaggtgtgaccccgcctgctctttcctcccccgccaggtgtggccccgcctgctctttcctcccccaccagtatggccccacctgctctttcctccccccccaaggtgtggccccacctgttctttcctcccctgccgaggtgtgaccccacctgctctttcctccctcccagtatggccccacctgctctttcctcccccgaggtgaggccccgcctgctctttcctcccatggggccgctgaggcatgagcacctgggcacaggttggggctctgcaggatgaggaagacaggccaatcccttccctcccagaagctggccgcccagcaggagggactgaggccagactcatgtccagcaaggaacgtgtggtgtgtcccctgggaagtctctgggccctgggaagagggaaggtgcacgtcctgggatggttgcggggccctgttttgggagacaaaggggtagagggtctgtcttgggcccccccagactctagcctgagcagtgcagccacctactgccccacctcagagaagtgcagcgggaaggaggctggaggtggtgcggcgctgcctcgggtgtctgcgtgaatgagcgtggccaaggaccagtgccacctcatggcaaagagctcccgcagtgtttgttagagtgcacatccctacgtgcccactggcacacacacgtgctcacatacatgtccgcatacaggcgtacacatgcacgcttgcacacatgcacacagaccacatagcacacatgtgcactgaccacacctgtatagaccatgcacagtacacatacgtgcatacacatgcctgcatacaggcatacacatgcacgcttacatgtacacgtgcacagatcacacacatgcacacacgtgtagctcacacacagtatacacatacacaagtgcacagaccacacacagcactaacacatgcacacacaaagtgcataggccacacagcacatgcacacaggtgcacagaccacacagcacacacaagtgcacagagcacactgcacacatgcacacacacacgcgtgcatgcacactcctcgcacttccagccttggagcccttctgtctctggtctttctctttgaccctgctgagtgtaagctgcctggggaggggctacaaggagtaattgtggctttaggggtcgtggtgatgctggaatgtcaagcgccgtcgtggggtatccgactgtccgggctcctggtccgcagtggcagagcgccaggcagagcccaatcagggtctcgtgctgcccttccctcccacagcctggcagccatccagaggaggggctctaccagatgccaaggtgccccggtgtctgtatgggtgtccggttgggtcctgtgtttggtctgccctggaggtgctgggccctcctgggatgggtggctcagcctcgaatcccaggccccagcccaggcaggtgctgctgcctgttgtggtttcctggcccagcttctccttctccctctgcataaaatcacagtccgtgagtcttccagctgccaccacggctgggacacgctgggggagggctcctcccatgcctcctgcacacagccgtctgagcagggcaggtgcccaacaccccccaccggaggacacgctgcccctcagcgatgcccctaccttttggggggcctcgtctcaagcccccccttggaggctgaaatcaccccaggcactgtgagggcttctccagggggcaccctttgagctgtgggtctgatcaccccaagtcccgcccggaggagaggcacagccagggcgtgtggtttaatgtttgcccccttcggggctggaggtctcagtgtttctagattccagaccctgctgccagagagacctgctgccggagagaaggggaggaggactccagctgggctcggtcccccacagtcagggacccccataaaggacacccccttctctctagaaagagctgggctctcagctatttctagttgcttcccagaagccgaggagcagaaggagctgtgagagctttgcagaaacgcccttgtccccgccctcctgagctatgaatgccgtacagagcagaggctggggcattggcaagatcacaggttgatgctgcacagccccattgacacaaaccctcaaagcagacgtgagagggacggttcacaaagctcggacctgccgtggagggtgcccggcagacgtggcgtgagagggacggctcacgaggcttggacctgctgtggagggtgcccagcagacgtggtgtgagaggaacggctcacgagacttggacctggtggagggtgcccagcagacgtggtgtgagagggacggctcacagggcttggacctgccatggagggtgcccggcagacgtggtgtgagagggatggttcacagggcttggacctgccatggagggtgcccggcagatgtggtgggagagagatggctcatgaggcttggacctgccgtggagggtgcccagcagacgtggtatgagagggatggctcacgaggcttggacctggtggagggtgcccggcagacgtgtgagagggacggttcacaaggcttggacctgccatggagggtgcccagcagacgtggtgtgagagggacagctcacgaggcttggacctgctgtggagggtgcccagcagggggctgagctctgaggggtgggtgctcagtgcacgggtgcccccagtgtcctctgatcctgtccggtgcctcccccaacccccacacccatgcagaactcccaggtcacatgcacgtatgtccagggcatgggggtggcgtgaagaggcctggtcagggcctttaggggctgcaggacggaatggccgcctggggagcctgtgtggctgtgccgggcagccatcctgcattcccacccagcgcgcagtctccacctcggccccagcaaagcgctaagcagccggagagacagccagggcggcttcctgaaggatgtgggatggtggactccggggtcgagggaatacgcaggttcctgtccctccgggagacctagagaagctgcacacccaggagctttccatgacccgggagcatgagtgaatgggggttccagtttgctgaactttgccgtcttgtaagggtgggggctgacggccgaccctgggaggaggtgacatcgccgggggaggttgtgggcaacggtggaggaggagagacgggaggggaccatttgggatggaggggcctcttcagagttttaaaaggcgtttgtggggtggagttgagtgtgctctgggcttggacacttgccgtggtgcccctggctggccgaggagactggctctggccaggggccccgtcctgagaggtcctcagcgtctgactctcggccaggcgccagcaaggaggggccggtccccggggctaccaggcaggcacgtgcacatcgccatcgccacacgccaactccgcctgggttttacaaagtcgttgccttaatgcatgtggacaggaactccctgaggtcgccccatgccccctggctgtgccaggtacggacgccctggaccctgcgaacaggtggggcgggcgaggggcccaagggacgggctccagagacacgcgcagggcaggaggggtctcacggaggggtctcgcactgaggcgcccagagctggtggtcccgctggacgccatccctctgcccgggatccacacggcccacgtgtgcccgccatgcccgcgccccacgccattgcagtctgccatcctctggccgtgacggtggctgcagcttccccatttgcgccgttgcctctggctgtctgcacttttgttcatgctccaaagaacatttcataatgccttcagtaccgacgtacacttctgaccattttgtatgtgtccttgtgccgtagtgaccaggcctttttttggtggatgtgttaccccgcacacttcaatctcaactttgtgcaccgtccattttctagggatagacgcccagggaatgaactctagttttctaacagattagctgagatattaacttactcacacggacaggttgatgccagagccgtaagaatgcgccagtgcgggtttgcgggggacttcgggtgtggggtcctgcggccgcgatggccgtggaaggttctggggatccctgctgccacggggacgagttcggacgccaggtggacctgtgcactcagtaaaacgcagtgattcaacctgga

SEQ ID NO: 3036 - RNA, 9154 nt, Homo sapiens
  source 1..9154: mol_type = mRNA
aggcgccgaggtgcgcgcggagcgaggtggccgcagcgtctccgcgcgcggcccaagcccggcaggagtgcggaaccgccgcctcggccatgcggctcccggccggggggcctgggctggggcccgcgccgccccccgcgctccgcccccgctgagcctgagcccgacccggggcgcctcccgccaggcaccatggtgcagaagtcgcgcaacggcggcgtataccccggcccgagcggggagaagaagctgaaggtgggcttcgtggggctggaccccggcgcgcccgactccacccgggacggggcgctgctgatcgccggctccgaggcccccaagcgcggcagcatcctcagcaaacctcgcgcgggcggcgcgggcgccgggaagccccccaagcgcaacgccttctaccgcaagctgcagaatttcctctacaacgtgctggagcggccgcgcggctgggcgttcatctaccacgcctacgtgttcctcctggttttctcctgcctcgtgctgtctgtgttttccaccatcaaggagtatgagaagagctcggagggggccctctacatcctggaaatcgtgactatcgtggtgtttggcgtggagtacttcgtgcggatctgggccgcaggctgctgctgccggtaccgtggctggagggggcggctcaagtttgcccggaaaccgttctgtgtgattgacatcatggtgctcatcgcctccattgcggtgctggccgccggctcccagggcaacgtctttgccacatctgcgctccggagcctgcgcttcctgcagattctgcggatgatccgcatggaccggcggggaggcacctggaagctgctgggctctgtggtctatgcccacagcaaggagctggtcactgcctggtacatcggcttcctttgtctcatcctggcctcgttcctggtgtacttggcagagaagggggagaacgaccactttgacacctacgcggatgcactctggtggggcctgatcacgctgaccaccattggctacggggacaagtacccccagacctggaacggcaggctccttgcggcaaccttcaccctcatcggtgtctccttcttcgcgctgcctgcaggcatcttggggtctgggtttgccctgaaggttcaggagcagcacaggcagaagcactttgagaagaggcggaacccggcagcaggcctgatccagtcggcctggagattctacgccaccaacctctcgcgcacagacctgcactccacgtggcagtactacgagcgaacggtcaccgtgcccatgtacagttcgcaaactcaaacctacggggcctccagacttatccccccgctgaaccagctggagctgctgaggaacctcaagagtaaatctggactcgctttcaggaaggaccccccgccggagccgtctccaagcccccgaggcgtggctgccaaggggaaggggtccccgcaggcccagactgtgaggcggtcacccagcgccgaccagagcctcgaggacagccccagcaaggtgcccaagagctggagcttcggggaccgcagccgggcacgccaggctttccgcatcaagggtgccgcgtcacggcagaactcagaagcaagcctccccggagaggacattgtggatgacaagagctgcccctgcgagtttgtgaccgaggacctgaccccgggcctcaaagtcagcatcagagccgtgtgtgtcatgcggttcctggtgtccaagcggaagttcaaggagagcctgcggccctacgacgtgatggacgtcatcgagcagtactcagccggccacctggacatgctgtcccgaattaagagcctgcagtccagagtggaccagatcgtggggcggggcccagcgatcacggacaaggaccgcaccaagggcccggccgaggcggagctgcccgaggaccccagcatgatgggacggctcgggaaggtggagaagcaggtcttgtccatggagaagaagctggacttcctggtgaatatctacatgcagcggatgggcatccccccgacagagaccgaggcctactttggggccaaagagccggagccggcgccgccgtaccacagcccggaagacagccgggagcatgtcgacaggcacggctgcattgtcaagatcgtgcgctccagcagctccacgggccagaagaacttctcggcgcccccggccgcgccccctgtccagtgtccgccctccacctcctggcagccacagagccacccgcgccagggccacggcacctcccccgtgggggaccacggctccctggtgcgcatcccgccgccgcctgcccacgagcggtcgctgtccgcctacggcgggggcaaccgcgccagcatggagttcctgcggcaggaggacaccccgggctgcaggccccccgaggggaacctgcgggacagcgacacgtccatctccatcccgtccgtggaccacgaggagctggagcgttccttcagcggcttcagcatctcccagtccaaggagaacctggatgctctcaacagctgctacgcggccgtggcgccttgtgccaaagtcaggccctacattgcggagggagagtcagacaccgactccgacctctgtaccccgtgcgggcccccgccacgctcggccaccggcgagggtccctttggtgacgtgggctgggccgggcccaggaagtgaggcggcgctgggccagtggacccgcccgcggccctcctcagcacggtgcctccgaggttttgaggcgggaaccctctggggcccttttcttacagtaactgagtgtggcgggaagggtgggccctggaggggcccatgtgggctgaaggatgggggctcctggcagtgaccttttacaaaagttattttccaacaggggctggagggctgggcagggccctgtggctccaggagcagcgtgcaggagcaaggctgccctgtccactctgctcagggccgcggccgacatcagcccggtgtgaggaggggcgggagtgatgacggggtgttgccagcgtggcaacaggcggggggttgtctcagccgagcccaggggaggcacaaagggcaggcctgttccctgaggacctgcgcaaagggcgggcctgtttggtgaggacctgcggccttgggtcccggtggggtttccgggcagctacaggcgggtgtggccggccgctgtgcgtggcctctgccttcacacctgacctgcccggcgggctttcctgttccccacctcaggggcgcccaaatacagagctattggttggcgtcttctccctgtaccttctgggatctgagggctctttccatggaagccagccccgaggtggagaccttcgcctgcagccgaggagcgggtggggcctgggaaccaaactggagccagagtggacgtccagccctctggtcttggcctccagagggagggcctggctcacggtggggccagggagccggctccaaagggtcttcaaaaagggggtccttgggggctccagctgcctcgccctggcctttctgtgggtgcgtgagagccagcagcaccccagccttggagaccgggggggcaggaccccaagtcctcccctctctcctgactgccctggccgggtgccggcactgcgagacccacctggtgagcaggcctcacagttcttagccagggccccacctcgcctgtgtcccaccagtgccccgacagacctggggcagggctgggccatgatgcagcgggccaggatagcctccaccgtcagcacagggccgccctccccgcctttccggaggaaaccactcccacctcagcccagctgtgcgccctccctagctctcctgccccctggagctgatggccccttctccactgaccgattccttagcggggcctcttggggtctcgggcctcgggtgcaccgtcccatgcccgtcctgttgtgggcaccgtggcccttggggcaggcggctctaatgcgggagcgagtccctagctccagacttaagaaccagaccccgggagcatctggcatttggcgtgacggcgtcgcaggcgggcctgggctccctggagagtggcctccctgggagtgagcagggctggggtcgtgggcgcaaatactcctgcagagcaagtgcaggggagtcctgggcccgtttctcctccacctgcgttttcagtgcacttggcttggctgggaggtcctgaggccctgaggccagcaggggaaccagtcctgagggagaggactttgaaagcagcatttgagggtcgtacgcccctggctggtgggggtcctggcgctcagggtgttcggggagccatgtctggcgtccattgtggggagctgctgccctggcctctctgcctacccccagcccggccagggcactcccaggccctgtcgccattgaggtgcctccgctgggctgtctcctcacccctccctgtgctggagcctgtcccaaaaaggtgccaactgggaggcctcggaagccactgtccaggctcccactgcctgtctgctctgttcccaaaggcagcgtgtgtggcctcgggccctgcggtggcatgaagcatcccttctggtgtgggcatcgctacgtgttttgggggcagcgtttcacggcggtgcccttgctgtctcccttgggctggctcgagcctggggtccatgtccctttgccgtcccgtcatggggcagggaatccatagcggggcccacaggcaggggtatgagtgcgtcccacccaacgcagcaccagccccggccaccgctccccgtgtccccagttccgtctcagctacctggactccaggaccctggagaagggagacctggcagtggagggaggctgtgctgtgtgtccccctgcaggtgtgaccccgcctgctctttcctcccccgccaggtgtggccccgcctgctctttcctcccccaccagtatggccccacctgctctttcctccccccccaaggtgtggccccacctgttctttcctcccctgccgaggtgtgaccccacctgctctttcctccctcccagtatggccccacctgctctttcctcccccgaggtgaggccccgcctgctctttcctcccatggggccgctgaggcatgagcacctgggcacaggttggggctctgcaggatgaggaagacaggccaatcccttccctcccagaagctggccgcccagcaggagggactgaggccagactcatgtccagcaaggaacgtgtggtgtgtcccctgggaagtctctgggccctgggaagagggaaggtgcacgtcctgggatggttgcggggccctgttttgggagacaaaggggtagagggtctgtcttgggcccccccagactctagcctgagcagtgcagccacctactgccccacctcagagaagtgcagcgggaaggaggctggaggtggtgcggcgctgcctcgggtgtctgcgtgaatgagcgtggccaaggaccagtgccacctcatggcaaagagctcccgcagtgtttgttagagtgcacatccctacgtgcccactggcacacacacgtgctcacatacatgtccgcatacaggcgtacacatgcacgcttgcacacatgcacacagaccacatagcacacatgtgcactgaccacacctgtatagaccatgcacagtacacatacgtgcatacacatgcctgcatacaggcatacacatgcacgcttacatgtacacgtgcacagatcacacacatgcacacacgtgtagctcacacacagtatacacatacacaagtgcacagaccacacacagcactaacacatgcacacacaaagtgcataggccacacagcacatgcacacaggtgcacagaccacacagcacacacaagtgcacagagcacactgcacacatgcacacacacacgcgtgcatgcacactcctcgcacttccagccttggagcccttctgtctctggtctttctctttgaccctgctgagtgtaagctgcctggggaggggctacaaggagtaattgtggctttaggggtcgtggtgatgctggaatgtcaagcgccgtcgtggggtatccgactgtccgggctcctggtccgcagtggcagagcgccaggcagagcccaatcagggtctcgtgctgcccttccctcccacagcctggcagccatccagaggaggggctctaccagatgccaaggtgccccggtgtctgtatgggtgtccggttgggtcctgtgtttggtctgccctggaggtgctgggccctcctgggatgggtggctcagcctcgaatcccaggccccagcccaggcaggtgctgctgcctgttgtggtttcctggcccagcttctccttctccctctgcataaaatcacagtccgtgagtcttccagctgccaccacggctgggacacgctgggggagggctcctcccatgcctcctgcacacagccgtctgagcagggcaggtgcccaacaccccccaccggaggacacgctgcccctcagcgatgcccctaccttttggggggcctcgtctcaagcccccccttggaggctgaaatcaccccaggcactgtgagggcttctccagggggcaccctttgagctgtgggtctgatcaccccaagtcccgcccggaggagaggcacagccagggcgtgtggtttaatgtttgcccccttcggggctggaggtctcagtgtttctagattccagaccctgctgccagagagacctgctgccggagagaaggggaggaggactccagctgggctcggtcccccacagtcagggacccccataaaggacacccccttctctctagaaagagctgggctctcagctatttctagttgcttcccagaagccgaggagcagaaggagctgtgagagctttgcagaaacgcccttgtccccgccctcctgagctatgaatgccgtacagagcagaggctggggcattggcaagatcacaggttgatgctgcacagccccattgacacaaaccctcaaagcagacgtgagagggacggttcacaaagctcggacctgccgtggagggtgcccggcagacgtggcgtgagagggacggctcacgaggcttggacctgctgtggagggtgcccagcagacgtggtgtgagaggaacggctcacgagacttggacctggtggagggtgcccagcagacgtggtgtgagagggacggctcacagggcttggacctgccatggagggtgcccggcagacgtggtgtgagagggatggttcacagggcttggacctgccatggagggtgcccggcagatgtggtgggagagagatggctcatgaggcttggacctgccgtggagggtgcccagcagacgtggtatgagagggatggctcacgaggcttggacctggtggagggtgcccggcagacgtgtgagagggacggttcacaaggcttggacctgccatggagggtgcccagcagacgtggtgtgagagggacagctcacgaggcttggacctgctgtggagggtgcccagcagggggctgagctctgaggggtgggtgctcagtgcacgggtgcccccagtgtcctctgatcctgtccggtgcctcccccaacccccacacccatgcagaactcccaggtcacatgcacgtatgtccagggcatgggggtggcgtgaagaggcctggtcagggcctttaggggctgcaggacggaatggccgcctggggagcctgtgtggctgtgccgggcagccatcctgcattcccacccagcgcgcagtctccacctcggccccagcaaagcgctaagcagccggagagacagccagggcggcttcctgaaggatgtgggatggtggactccggggtcgagggaatacgcaggttcctgtccctccgggagacctagagaagctgcacacccaggagctttccatgacccgggagcatgagtgaatgggggttccagtttgctgaactttgccgtcttgtaagggtgggggctgacggccgaccctgggaggaggtgacatcgccgggggaggttgtgggcaacggtggaggaggagagacgggaggggaccatttgggatggaggggcctcttcagagttttaaaaggcgtttgtggggtggagttgagtgtgctctgggcttggacacttgccgtggtgcccctggctggccgaggagactggctctggccaggggccccgtcctgagaggtcctcagcgtctgactctcggccaggcgccagcaaggaggggccggtccccggggctaccaggcaggcacgtgcacatcgccatcgccacacgccaactccgcctgggttttacaaagtcgttgccttaatgcatgtggacaggaactccctgaggtcgccccatgccccctggctgtgccaggtacggacgccctggaccctgcgaacaggtggggcgggcgaggggcccaagggacgggctccagagacacgcgcagggcaggaggggtctcacggaggggtctcgcactgaggcgcccagagctggtggtcccgctggacgccatccctctgcccgggatccacacggcccacgtgtgcccgccatgcccgcgccccacgccattgcagtctgccatcctctggccgtgacggtggctgcagcttccccatttgcgccgttgcctctggctgtctgcacttttgttcatgctccaaagaacatttcataatgccttcagtaccgacgtacacttctgaccattttgtatgtgtccttgtgccgtagtgaccaggcctttttttggtggatgtgttaccccgcacacttcaatctcaactttgtgcaccgtccattttctagggatagacgcccagggaatgaactctagttttctaacagattagctgagatattaacttactcacacggacaggttgatgccagagccgtaagaatgcgccagtgcgggtttgcgggggacttcgggtgtggggtcctgcggccgcgatggccgtggaaggttctggggatccctgctgccacggggacgagttcggacgccaggtggacctgtgcactcagtaaaacgcagtgattcaacctgga

SEQ ID NO: 3037 - RNA, 1441 nt, Homo sapiens
  source 1..1441: mol_type = mRNA
aggcgccgaggtgcgcgcggagcgaggtggccgcagcgtctccgcgcgcggcccaagcccggcaggagtgcggaaccgccgcctcggccatgcggctcccggccggggggcctgggctggggcccgcgccgccccccgcgctccgcccccgctgagcctgagcccgacccggggcgcctcccgccaggcaccatggtgcagaagtcgcgcaacggcggcgtataccccggcccgagcggggagaagaagctgaaggtgggcttcgtggggctggaccccggcgcgcccgactccacccgggacggggcgctgctgatcgccggctccgaggcccccaagcgcggcagcatcctcagcaaacctcgcgcgggcggcgcgggcgccgggaagccccccaagcgcaacgccttctaccgcaagctgcagaatttcctctacaacgtgctggagcggccgcgcggctgggcgttcatctaccacgcctacgtgttcctcctggttttctcctgcctcgtgctgtctgtgttttccaccatcaaggagtatgagaagagctcggagggggccctctacatcctggaaatcgtgactatcgtggtgtttggcgtggagtacttcgtgcggatctgggccgcaggctgctgctgccggtaccgtggctggagggggcggctcaagtttgcccggaaaccgttctgtgtgattgacatcatggtgctcatcgcctccattgcggtgctggccgccggctcccagggcaacgtctttgccacatctgcgctccggagcctgcgcttcctgcagattctgcggatgatccgcatggaccggcggggaggcacctggaagctgctgggctctgtggtctatgcccacagcaaggagctggtcactgcctggtacatcggcttcctttgtctcatcctggcctcgttcctggtgtacttggcagagaagggggagaacgaccactttgacacctacgcggatgcactctggtggggcctgatcacgctgaccaccattggctacggggacaagtacccccagacctggaacggcaggctccttgcggcaaccttcaccctcatcggtgtctccttcttcgcgctgcctgcaggcatcttggggtctgggtttgccctgaaggttcaggagcagcacaggcagaagcactttgagaagaggcggaacccggcagcaggcctgatccagtcggcctggagattctacgccaccaacctctcgcgcacagacctgcactccacgtggcagtactacgagcgaacggtcaccgtgcccatgtacaggtaccgccgccgggcacctgccaccaagcaactgtttcattttttattttccatttgttcttaaaccccactttttgttgttcattattttgattgattttttttctttaaaatgtatttttcacaaagga

SEQ ID NO: 3038 - RNA, 9237 nt, Homo sapiens
  source 1..9237: mol_type = mRNA
agcgtctccgcgcgcggcccaagcccggcaggagtgcggaaccgccgcctcggccatgcggctcccggccggggggcctgggctggggcccgcgccgccccccgcgctccgcccccgctgagcctgagcccgacccggggcgcctcccgccaggcaccatggtgcagaagtcgcgcaacggcggcgtataccccggcccgagcggggagaagaagctgaaggtgggcttcgtggggctggaccccggcgcgcccgactccacccgggacggggcgctgctgatcgccggctccgaggcccccaagcgcggcagcatcctcagcaaacctcgcgcgggcggcgcgggcgccgggaagccccccaagcgcaacgccttctaccgcaagctgcagaatttcctctacaacgtgctggagcggccgcgcggctgggcgttcatctaccacgcctacgtgttcctcctggttttctcctgcctcgtgctgtctgtgttttccaccatcaaggagtatgagaagagctcggagggggccctctacatcctggaaatcgtgactatcgtggtgtttggcgtggagtacttcgtgcggatctgggccgcaggctgctgctgccggtaccgtggctggagggggcggctcaagtttgcccggaaaccgttctgtgtgattgacatcatggtgctcatcgcctccattgcggtgctggccgccggctcccagggcaacgtctttgccacatctgcgctccggagcctgcgcttcctgcagattctgcggatgatccgcatggaccggcggggaggcacctggaagctgctgggctctgtggtctatgcccacagcaaggagctggtcactgcctggtacatcggcttcctttgtctcatcctggcctcgttcctggtgtacttggcagagaagggggagaacgaccactttgacacctacgcggatgcactctggtggggcctgatcacgctgaccaccattggctacggggacaagtacccccagacctggaacggcaggctccttgcggcaaccttcaccctcatcggtgtctccttcttcgcgctgcctgcaggcatcttggggtctgggtttgccctgaaggttcaggagcagcacaggcagaagcactttgagaagaggcggaacccggcagcaggcctgatccagtcggcctggagattctacgccaccaacctctcgcgcacagacctgcactccacgtggcagtactacgagcgaacggtcaccgtgcccatgtacagacttatccccccgctgaaccagctggagctgctgaggaacctcaagagtaaatctggactcgctttcaggaaggaccccccgccggagccgtctccaagccagaaggtcagtttgaaagatcgtgtcttctccagcccccgaggcgtggctgccaaggggaaggggtccccgcaggcccagactgtgaggcggtcacccagcgccgaccagagcctcgaggacagccccagcaaggtgcccaagagctggagcttcggggaccgcagccgggcacgccaggctttccgcatcaagggtgccgcgtcacggcagaactcagaagaagcaagcctccccggagaggacattgtggatgacaagagctgcccctgcgagtttgtgaccgaggacctgaccccgggcctcaaagtcagcatcagagccgtgtgtgtcatgcggttcctggtgtccaagcggaagttcaaggagagcctgcggccctacgacgtgatggacgtcatcgagcagtactcagccggccacctggacatgctgtcccgaattaagagcctgcagtccaggatagatatgattgtgggtcccccgcccccttcaactccccggcacaagaagtaccccaccaaaggacccacggcccctccgagagagtcaccccagtactcacctagagtggaccagatcgtggggcggggcccagcgatcacggacaaggaccgcaccaagggcccggccgaggcggagctgcccgaggaccccagcatgatgggacggctcgggaaggtggagaagcaggtcttgtccatggagaagaagctggacttcctggtgaatatctacatgcagcggatgggcatccccccgacagagaccgaggcctactttggggccaaagagccggagccggcgccgccgtaccacagcccggaagacagccgggagcatgtcgacaggcacggctgcattgtcaagatcgtgcgctccagcagctccacgggccagaagaacttctcggcgcccccggccgcgccccctgtccagtgtccgccctccacctcctggcagccacagagccacccgcgccagggccacggcacctcccccgtgggggaccacggctccctggtgcgcatcccgccgccgcctgcccacgagcggtcgctgtccgcctacggcgggggcaaccgcgccagcatggagttcctgcggcaggaggacaccccgggctgcaggccccccgaggggaacctgcgggacagcgacacgtccatctccatcccgtccgtggaccacgaggagctggagcgttccttcagcggcttcagcatctcccagtccaaggagaacctggatgctctcaacagctgctacgcggccgtggcgccttgtgccaaagtcaggccctacattgcggagggagagtcagacaccgactccgacctctgtaccccgtgcgggcccccgccacgctcggccaccggcgagggtccctttggtgacgtgggctgggccgggcccaggaagtgaggcggcgctgggccagtggacccgcccgcggccctcctcagcacggtgcctccgaggttttgaggcgggaaccctctggggcccttttcttacagtaactgagtgtggcgggaagggtgggccctggaggggcccatgtgggctgaaggatgggggctcctggcagtgaccttttacaaaagttattttccaacaggggctggagggctgggcagggccctgtggctccaggagcagcgtgcaggagcaaggctgccctgtccactctgctcagggccgcggccgacatcagcccggtgtgaggaggggcgggagtgatgacggggtgttgccagcgtggcaacaggcggggggttgtctcagccgagcccaggggaggcacaaagggcaggcctgttccctgaggacctgcgcaaagggcgggcctgtttggtgaggacctgcggccttgggtcccggtggggtttccgggcagctacaggcgggtgtggccggccgctgtgcgtggcctctgccttcacacctgacctgcccggcgggctttcctgttccccacctcaggggcgcccaaatacagagctattggttggcgtcttctccctgtaccttctgggatctgagggctctttccatggaagccagccccgaggtggagaccttcgcctgcagccgaggagcgggtggggcctgggaaccaaactggagccagagtggacgtccagccctctggtcttggcctccagagggagggcctggctcacggtggggccagggagccggctccaaagggtcttcaaaaagggggtccttgggggctccagctgcctcgccctggcctttctgtgggtgcgtgagagccagcagcaccccagccttggagaccgggggggcaggaccccaagtcctcccctctctcctgactgccctggccgggtgccggcactgcgagacccacctggtgagcaggcctcacagttcttagccagggccccacctcgcctgtgtcccaccagtgccccgacagacctggggcagggctgggccatgatgcagcgggccaggatagcctccaccgtcagcacagggccgccctccccgcctttccggaggaaaccactcccacctcagcccagctgtgcgccctccctagctctcctgccccctggagctgatggccccttctccactgaccgattccttagcggggcctcttggggtctcgggcctcgggtgcaccgtcccatgcccgtcctgttgtgggcaccgtggcccttggggcaggcggctctaatgcgggagcgagtccctagctccagacttaagaaccagaccccgggagcatctggcatttggcgtgacggcgtcgcaggcgggcctgggctccctggagagtggcctccctgggagtgagcagggctggggtcgtgggcgcaaatactcctgcagagcaagtgcaggggagtcctgggcccgtttctcctccacctgcgttttcagtgcacttggcttggctgggaggtcctgaggccctgaggccagcaggggaaccagtcctgagggagaggactttgaaagcagcatttgagggtcgtacgcccctggctggtgggggtcctggcgctcagggtgttcggggagccatgtctggcgtccattgtggggagctgctgccctggcctctctgcctacccccagcccggccagggcactcccaggccctgtcgccattgaggtgcctccgctgggctgtctcctcacccctccctgtgctggagcctgtcccaaaaaggtgccaactgggaggcctcggaagccactgtccaggctcccactgcctgtctgctctgttcccaaaggcagcgtgtgtggcctcgggccctgcggtggcatgaagcatcccttctggtgtgggcatcgctacgtgttttgggggcagcgtttcacggcggtgcccttgctgtctcccttgggctggctcgagcctggggtccatgtccctttgccgtcccgtcatggggcagggaatccatagcggggcccacaggcaggggtatgagtgcgtcccacccaacgcagcaccagccccggccaccgctccccgtgtccccagttccgtctcagctacctggactccaggaccctggagaagggagacctggcagtggagggaggctgtgctgtgtgtccccctgcaggtgtgaccccgcctgctctttcctcccccgccaggtgtggccccgcctgctctttcctcccccaccagtatggccccacctgctctttcctccccccccaaggtgtggccccacctgttctttcctcccctgccgaggtgtgaccccacctgctctttcctccctcccagtatggccccacctgctctttcctcccccgaggtgaggccccgcctgctctttcctcccatggggccgctgaggcatgagcacctgggcacaggttggggctctgcaggatgaggaagacaggccaatcccttccctcccagaagctggccgcccagcaggagggactgaggccagactcatgtccagcaaggaacgtgtggtgtgtcccctgggaagtctctgggccctgggaagagggaaggtgcacgtcctgggatggttgcggggccctgttttgggagacaaaggggtagagggtctgtcttgggcccccccagactctagcctgagcagtgcagccacctactgccccacctcagagaagtgcagcgggaaggaggctggaggtggtgcggcgctgcctcgggtgtctgcgtgaatgagcgtggccaaggaccagtgccacctcatggcaaagagctcccgcagtgtttgttagagtgcacatccctacgtgcccactggcacacacacgtgctcacatacatgtccgcatacaggcgtacacatgcacgcttgcacacatgcacacagaccacatagcacacatgtgcactgaccacacctgtatagaccatgcacagtacacatacgtgcatacacatgcctgcatacaggcatacacatgcacgcttacatgtacacgtgcacagatcacacacatgcacacacgtgtagctcacacacagtatacacatacacaagtgcacagaccacacacagcactaacacatgcacacacaaagtgcataggccacacagcacatgcacacaggtgcacagaccacacagcacacacaagtgcacagagcacactgcacacatgcacacacacacgcgtgcatgcacactcctcgcacttccagccttggagcccttctgtctctggtctttctctttgaccctgctgagtgtaagctgcctggggaggggctacaaggagtaattgtggctttaggggtcgtggtgatgctggaatgtcaagcgccgtcgtggggtatccgactgtccgggctcctggtccgcagtggcagagcgccaggcagagcccaatcagggtctcgtgctgcccttccctcccacagcctggcagccatccagaggaggggctctaccagatgccaaggtgccccggtgtctgtatgggtgtccggttgggtcctgtgtttggtctgccctggaggtgctgggccctcctgggatgggtggctcagcctcgaatcccaggccccagcccaggcaggtgctgctgcctgttgtggtttcctggcccagcttctccttctccctctgcataaaatcacagtccgtgagtcttccagctgccaccacggctgggacacgctgggggagggctcctcccatgcctcctgcacacagccgtctgagcagggcaggtgcccaacaccccccaccggaggacacgctgcccctcagcgatgcccctaccttttggggggcctcgtctcaagcccccccttggaggctgaaatcaccccaggcactgtgagggcttctccagggggcaccctttgagctgtgggtctgatcaccccaagtcccgcccggaggagaggcacagccagggcgtgtggtttaatgtttgcccccttcggggctggaggtctcagtgtttctagattccagaccctgctgccagagagacctgctgccggagagaaggggaggaggactccagctgggctcggtcccccacagtcagggacccccataaaggacacccccttctctctagaaagagctgggctctcagctatttctagttgcttcccagaagccgaggagcagaaggagctgtgagagctttgcagaaacgcccttgtccccgccctcctgagctatgaatgccgtacagagcagaggctggggcattggcaagatcacaggttgatgctgcacagccccattgacacaaaccctcaaagcagacgtgagagggacggttcacaaagctcggacctgccgtggagggtgcccggcagacgtggcgtgagagggacggctcacgaggcttggacctgctgtggagggtgcccagcagacgtggtgtgagaggaacggctcacgagacttggacctggtggagggtgcccagcagacgtggtgtgagagggacggctcacagggcttggacctgccatggagggtgcccggcagacgtggtgtgagagggatggttcacagggcttggacctgccatggagggtgcccggcagatgtggtgggagagagatggctcatgaggcttggacctgccgtggagggtgcccagcagacgtggtatgagagggatggctcacgaggcttggacctggtggagggtgcccggcagacgtgtgagagggacggttcacaaggcttggacctgccatggagggtgcccagcagacgtggtgtgagagggacagctcacgaggcttggacctgctgtggagggtgcccagcagggggctgagctctgaggggtgggtgctcagtgcacgggtgcccccagtgtcctctgatcctgtccggtgcctcccccaacccccacacccatgcagaactcccaggtcacatgcacgtatgtccagggcatgggggtggcgtgaagaggcctggtcagggcctttaggggctgcaggacggaatggccgcctggggagcctgtgtggctgtgccgggcagccatcctgcattcccacccagcgcgcagtctccacctcggccccagcaaagcgctaagcagccggagagacagccagggcggcttcctgaaggatgtgggatggtggactccggggtcgagggaatacgcaggttcctgtccctccgggagacctagagaagctgcacacccaggagctttccatgacccgggagcatgagtgaatgggggttccagtttgctgaactttgccgtcttgtaagggtgggggctgacggccgaccctgggaggaggtgacatcgccgggggaggttgtgggcaacggtggaggaggagagacgggaggggaccatttgggatggaggggcctcttcagagttttaaaaggcgtttgtggggtggagttgagtgtgctctgggcttggacacttgccgtggtgcccctggctggccgaggagactggctctggccaggggccccgtcctgagaggtcctcagcgtctgactctcggccaggcgccagcaaggaggggccggtccccggggctaccaggcaggcacgtgcacatcgccatcgccacacgccaactccgcctgggttttacaaagtcgttgccttaatgcatgtggacaggaactccctgaggtcgccccatgccccctggctgtgccaggtacggacgccctggaccctgcgaacaggtggggcgggcgaggggcccaagggacgggctccagagacacgcgcagggcaggaggggtctcacggaggggtctcgcactgaggcgcccagagctggtggtcccgctggacgccatccctctgcccgggatccacacggcccacgtgtgcccgccatgcccgcgccccacgccattgcagtctgccatcctctggccgtgacggtggctgcagcttccccatttgcgccgttgcctctggctgtctgcacttttgttcatgctccaaagaacatttcataatgccttcagtaccgacgtacacttctgaccattttgtatgtgtccttgtgccgtagtgaccaggcctttttttggtggatgtgttaccccgcacacttcaatctcaactttgtgcaccgtccattttctagggatagacgcccagggaatgaactctagttttctaacagattagctgagatattaacttactcacacggacaggttgatgccagagccgtaagaatgcgccagtgcgggtttgcgggggacttcgggtgtggggtcctgcggccgcgatggccgtggaaggttctggggatccctgctgccacggggacgagttcggacgccaggtggacctgtgcactcagtaaaacgcagtgattcaacctgga

SEQ ID NO: 3039 - RNA, 9156 nt, Homo sapiens
  source 1..9156: mol_type = mRNA
agcgtctccgcgcgcggcccaagcccggcaggagtgcggaaccgccgcctcggccatgcggctcccggccggggggcctgggctggggcccgcgccgccccccgcgctccgcccccgctgagcctgagcccgacccggggcgcctcccgccaggcaccatggtgcagaagtcgcgcaacggcggcgtataccccggcccgagcggggagaagaagctgaaggtgggcttcgtggggctggaccccggcgcgcccgactccacccgggacggggcgctgctgatcgccggctccgaggcccccaagcgcggcagcatcctcagcaaacctcgcgcgggcggcgcgggcgccgggaagccccccaagcgcaacgccttctaccgcaagctgcagaatttcctctacaacgtgctggagcggccgcgcggctgggcgttcatctaccacgcctacgtgttcctcctggttttctcctgcctcgtgctgtctgtgttttccaccatcaaggagtatgagaagagctcggagggggccctctacatcctggaaatcgtgactatcgtggtgtttggcgtggagtacttcgtgcggatctgggccgcaggctgctgctgccggtaccgtggctggagggggcggctcaagtttgcccggaaaccgttctgtgtgattgacatcatggtgctcatcgcctccattgcggtgctggccgccggctcccagggcaacgtctttgccacatctgcgctccggagcctgcgcttcctgcagattctgcggatgatccgcatggaccggcggggaggcacctggaagctgctgggctctgtggtctatgcccacagcaaggagctggtcactgcctggtacatcggcttcctttgtctcatcctggcctcgttcctggtgtacttggcagagaagggggagaacgaccactttgacacctacgcggatgcactctggtggggcctgatcacgctgaccaccattggctacggggacaagtacccccagacctggaacggcaggctccttgcggcaaccttcaccctcatcggtgtctccttcttcgcgctgcctgcaggcatcttggggtctgggtttgccctgaaggttcaggagcagcacaggcagaagcactttgagaagaggcggaacccggcagcaggcctgatccagtcggcctggagattctacgccaccaacctctcgcgcacagacctgcactccacgtggcagtactacgagcgaacggtcaccgtgcccatgtacagttcgcaaactcaaacctacggggcctccagacttatccccccgctgaaccagctggagctgctgaggaacctcaagagtaaatctggactcgctttcaggaaggaccccccgccggagccgtctccaagccagaaggtcagtttgaaagatcgtgtcttctccagcccccgaggcgtggctgccaaggggaaggggtccccgcaggcccagactgtgaggcggtcacccagcgccgaccagagcctcgaggacagccccagcaaggtgcccaagagctggagcttcggggaccgcagccgggcacgccaggctttccgcatcaagggtgccgcgtcacggcagaactcagaagcaagcctccccggagaggacattgtggatgacaagagctgcccctgcgagtttgtgaccgaggacctgaccccgggcctcaaagtcagcatcagagccgtgtgtgtcatgcggttcctggtgtccaagcggaagttcaaggagagcctgcggccctacgacgtgatggacgtcatcgagcagtactcagccggccacctggacatgctgtcccgaattaagagcctgcagtccagagtggaccagatcgtggggcggggcccagcgatcacggacaaggaccgcaccaagggcccggccgaggcggagctgcccgaggaccccagcatgatgggacggctcgggaaggtggagaagcaggtcttgtccatggagaagaagctggacttcctggtgaatatctacatgcagcggatgggcatccccccgacagagaccgaggcctactttggggccaaagagccggagccggcgccgccgtaccacagcccggaagacagccgggagcatgtcgacaggcacggctgcattgtcaagatcgtgcgctccagcagctccacgggccagaagaacttctcggcgcccccggccgcgccccctgtccagtgtccgccctccacctcctggcagccacagagccacccgcgccagggccacggcacctcccccgtgggggaccacggctccctggtgcgcatcccgccgccgcctgcccacgagcggtcgctgtccgcctacggcgggggcaaccgcgccagcatggagttcctgcggcaggaggacaccccgggctgcaggccccccgaggggaacctgcgggacagcgacacgtccatctccatcccgtccgtggaccacgaggagctggagcgttccttcagcggcttcagcatctcccagtccaaggagaacctggatgctctcaacagctgctacgcggccgtggcgccttgtgccaaagtcaggccctacattgcggagggagagtcagacaccgactccgacctctgtaccccgtgcgggcccccgccacgctcggccaccggcgagggtccctttggtgacgtgggctgggccgggcccaggaagtgaggcggcgctgggccagtggacccgcccgcggccctcctcagcacggtgcctccgaggttttgaggcgggaaccctctggggcccttttcttacagtaactgagtgtggcgggaagggtgggccctggaggggcccatgtgggctgaaggatgggggctcctggcagtgaccttttacaaaagttattttccaacaggggctggagggctgggcagggccctgtggctccaggagcagcgtgcaggagcaaggctgccctgtccactctgctcagggccgcggccgacatcagcccggtgtgaggaggggcgggagtgatgacggggtgttgccagcgtggcaacaggcggggggttgtctcagccgagcccaggggaggcacaaagggcaggcctgttccctgaggacctgcgcaaagggcgggcctgtttggtgaggacctgcggccttgggtcccggtggggtttccgggcagctacaggcgggtgtggccggccgctgtgcgtggcctctgccttcacacctgacctgcccggcgggctttcctgttccccacctcaggggcgcccaaatacagagctattggttggcgtcttctccctgtaccttctgggatctgagggctctttccatggaagccagccccgaggtggagaccttcgcctgcagccgaggagcgggtggggcctgggaaccaaactggagccagagtggacgtccagccctctggtcttggcctccagagggagggcctggctcacggtggggccagggagccggctccaaagggtcttcaaaaagggggtccttgggggctccagctgcctcgccctggcctttctgtgggtgcgtgagagccagcagcaccccagccttggagaccgggggggcaggaccccaagtcctcccctctctcctgactgccctggccgggtgccggcactgcgagacccacctggtgagcaggcctcacagttcttagccagggccccacctcgcctgtgtcccaccagtgccccgacagacctggggcagggctgggccatgatgcagcgggccaggatagcctccaccgtcagcacagggccgccctccccgcctttccggaggaaaccactcccacctcagcccagctgtgcgccctccctagctctcctgccccctggagctgatggccccttctccactgaccgattccttagcggggcctcttggggtctcgggcctcgggtgcaccgtcccatgcccgtcctgttgtgggcaccgtggcccttggggcaggcggctctaatgcgggagcgagtccctagctccagacttaagaaccagaccccgggagcatctggcatttggcgtgacggcgtcgcaggcgggcctgggctccctggagagtggcctccctgggagtgagcagggctggggtcgtgggcgcaaatactcctgcagagcaagtgcaggggagtcctgggcccgtttctcctccacctgcgttttcagtgcacttggcttggctgggaggtcctgaggccctgaggccagcaggggaaccagtcctgagggagaggactttgaaagcagcatttgagggtcgtacgcccctggctggtgggggtcctggcgctcagggtgttcggggagccatgtctggcgtccattgtggggagctgctgccctggcctctctgcctacccccagcccggccagggcactcccaggccctgtcgccattgaggtgcctccgctgggctgtctcctcacccctccctgtgctggagcctgtcccaaaaaggtgccaactgggaggcctcggaagccactgtccaggctcccactgcctgtctgctctgttcccaaaggcagcgtgtgtggcctcgggccctgcggtggcatgaagcatcccttctggtgtgggcatcgctacgtgttttgggggcagcgtttcacggcggtgcccttgctgtctcccttgggctggctcgagcctggggtccatgtccctttgccgtcccgtcatggggcagggaatccatagcggggcccacaggcaggggtatgagtgcgtcccacccaacgcagcaccagccccggccaccgctccccgtgtccccagttccgtctcagctacctggactccaggaccctggagaagggagacctggcagtggagggaggctgtgctgtgtgtccccctgcaggtgtgaccccgcctgctctttcctcccccgccaggtgtggccccgcctgctctttcctcccccaccagtatggccccacctgctctttcctccccccccaaggtgtggccccacctgttctttcctcccctgccgaggtgtgaccccacctgctctttcctccctcccagtatggccccacctgctctttcctcccccgaggtgaggccccgcctgctctttcctcccatggggccgctgaggcatgagcacctgggcacaggttggggctctgcaggatgaggaagacaggccaatcccttccctcccagaagctggccgcccagcaggagggactgaggccagactcatgtccagcaaggaacgtgtggtgtgtcccctgggaagtctctgggccctgggaagagggaaggtgcacgtcctgggatggttgcggggccctgttttgggagacaaaggggtagagggtctgtcttgggcccccccagactctagcctgagcagtgcagccacctactgccccacctcagagaagtgcagcgggaaggaggctggaggtggtgcggcgctgcctcgggtgtctgcgtgaatgagcgtggccaaggaccagtgccacctcatggcaaagagctcccgcagtgtttgttagagtgcacatccctacgtgcccactggcacacacacgtgctcacatacatgtccgcatacaggcgtacacatgcacgcttgcacacatgcacacagaccacatagcacacatgtgcactgaccacacctgtatagaccatgcacagtacacatacgtgcatacacatgcctgcatacaggcatacacatgcacgcttacatgtacacgtgcacagatcacacacatgcacacacgtgtagctcacacacagtatacacatacacaagtgcacagaccacacacagcactaacacatgcacacacaaagtgcataggccacacagcacatgcacacaggtgcacagaccacacagcacacacaagtgcacagagcacactgcacacatgcacacacacacgcgtgcatgcacactcctcgcacttccagccttggagcccttctgtctctggtctttctctttgaccctgctgagtgtaagctgcctggggaggggctacaaggagtaattgtggctttaggggtcgtggtgatgctggaatgtcaagcgccgtcgtggggtatccgactgtccgggctcctggtccgcagtggcagagcgccaggcagagcccaatcagggtctcgtgctgcccttccctcccacagcctggcagccatccagaggaggggctctaccagatgccaaggtgccccggtgtctgtatgggtgtccggttgggtcctgtgtttggtctgccctggaggtgctgggccctcctgggatgggtggctcagcctcgaatcccaggccccagcccaggcaggtgctgctgcctgttgtggtttcctggcccagcttctccttctccctctgcataaaatcacagtccgtgagtcttccagctgccaccacggctgggacacgctgggggagggctcctcccatgcctcctgcacacagccgtctgagcagggcaggtgcccaacaccccccaccggaggacacgctgcccctcagcgatgcccctaccttttggggggcctcgtctcaagcccccccttggaggctgaaatcaccccaggcactgtgagggcttctccagggggcaccctttgagctgtgggtctgatcaccccaagtcccgcccggaggagaggcacagccagggcgtgtggtttaatgtttgcccccttcggggctggaggtctcagtgtttctagattccagaccctgctgccagagagacctgctgccggagagaaggggaggaggactccagctgggctcggtcccccacagtcagggacccccataaaggacacccccttctctctagaaagagctgggctctcagctatttctagttgcttcccagaagccgaggagcagaaggagctgtgagagctttgcagaaacgcccttgtccccgccctcctgagctatgaatgccgtacagagcagaggctggggcattggcaagatcacaggttgatgctgcacagccccattgacacaaaccctcaaagcagacgtgagagggacggttcacaaagctcggacctgccgtggagggtgcccggcagacgtggcgtgagagggacggctcacgaggcttggacctgctgtggagggtgcccagcagacgtggtgtgagaggaacggctcacgagacttggacctggtggagggtgcccagcagacgtggtgtgagagggacggctcacagggcttggacctgccatggagggtgcccggcagacgtggtgtgagagggatggttcacagggcttggacctgccatggagggtgcccggcagatgtggtgggagagagatggctcatgaggcttggacctgccgtggagggtgcccagcagacgtggtatgagagggatggctcacgaggcttggacctggtggagggtgcccggcagacgtgtgagagggacggttcacaaggcttggacctgccatggagggtgcccagcagacgtggtgtgagagggacagctcacgaggcttggacctgctgtggagggtgcccagcagggggctgagctctgaggggtgggtgctcagtgcacgggtgcccccagtgtcctctgatcctgtccggtgcctcccccaacccccacacccatgcagaactcccaggtcacatgcacgtatgtccagggcatgggggtggcgtgaagaggcctggtcagggcctttaggggctgcaggacggaatggccgcctggggagcctgtgtggctgtgccgggcagccatcctgcattcccacccagcgcgcagtctccacctcggccccagcaaagcgctaagcagccggagagacagccagggcggcttcctgaaggatgtgggatggtggactccggggtcgagggaatacgcaggttcctgtccctccgggagacctagagaagctgcacacccaggagctttccatgacccgggagcatgagtgaatgggggttccagtttgctgaactttgccgtcttgtaagggtgggggctgacggccgaccctgggaggaggtgacatcgccgggggaggttgtgggcaacggtggaggaggagagacgggaggggaccatttgggatggaggggcctcttcagagttttaaaaggcgtttgtggggtggagttgagtgtgctctgggcttggacacttgccgtggtgcccctggctggccgaggagactggctctggccaggggccccgtcctgagaggtcctcagcgtctgactctcggccaggcgccagcaaggaggggccggtccccggggctaccaggcaggcacgtgcacatcgccatcgccacacgccaactccgcctgggttttacaaagtcgttgccttaatgcatgtggacaggaactccctgaggtcgccccatgccccctggctgtgccaggtacggacgccctggaccctgcgaacaggtggggcgggcgaggggcccaagggacgggctccagagacacgcgcagggcaggaggggtctcacggaggggtctcgcactgaggcgcccagagctggtggtcccgctggacgccatccctctgcccgggatccacacggcccacgtgtgcccgccatgcccgcgccccacgccattgcagtctgccatcctctggccgtgacggtggctgcagcttccccatttgcgccgttgcctctggctgtctgcacttttgttcatgctccaaagaacatttcataatgccttcagtaccgacgtacacttctgaccattttgtatgtgtccttgtgccgtagtgaccaggcctttttttggtggatgtgttaccccgcacacttcaatctcaactttgtgcaccgtccattttctagggatagacgcccagggaatgaactctagttttctaacagattagctgagatattaacttactcacacggacaggttgatgccagagccgtaagaatgcgccagtgcgggtttgcgggggacttcgggtgtggggtcctgcggccgcgatggccgtggaaggttctggggatccctgctgccacggggacgagttcggacgccaggtggacctgtgcactcagtaaaacgcagtgattcaacctgga

SEQ ID NO: 3040 - RNA, 9264 nt, Homo sapiens
  source 1..9264: mol_type = mRNA
agcgtctccgcgcgcggcccaagcccggcaggagtgcggaaccgccgcctcggccatgcggctcccggccggggggcctgggctggggcccgcgccgccccccgcgctccgcccccgctgagcctgagcccgacccggggcgcctcccgccaggcaccatggtgcagaagtcgcgcaacggcggcgtataccccggcccgagcggggagaagaagctgaaggtgggcttcgtggggctggaccccggcgcgcccgactccacccgggacggggcgctgctgatcgccggctccgaggcccccaagcgcggcagcatcctcagcaaacctcgcgcgggcggcgcgggcgccgggaagccccccaagcgcaacgccttctaccgcaagctgcagaatttcctctacaacgtgctggagcggccgcgcggctgggcgttcatctaccacgcctacgtgttcctcctggttttctcctgcctcgtgctgtctgtgttttccaccatcaaggagtatgagaagagctcggagggggccctctacatcctggaaatcgtgactatcgtggtgtttggcgtggagtacttcgtgcggatctgggccgcaggctgctgctgccggtaccgtggctggagggggcggctcaagtttgcccggaaaccgttctgtgtgattgacatcatggtgctcatcgcctccattgcggtgctggccgccggctcccagggcaacgtctttgccacatctgcgctccggagcctgcgcttcctgcagattctgcggatgatccgcatggaccggcggggaggcacctggaagctgctgggctctgtggtctatgcccacagcaaggagctggtcactgcctggtacatcggcttcctttgtctcatcctggcctcgttcctggtgtacttggcagagaagggggagaacgaccactttgacacctacgcggatgcactctggtggggcctgatcacgctgaccaccattggctacggggacaagtacccccagacctggaacggcaggctccttgcggcaaccttcaccctcatcggtgtctccttcttcgcgctgcctgcaggcatcttggggtctgggtttgccctgaaggttcaggagcagcacaggcagaagcactttgagaagaggcggaacccggcagcaggcctgatccagtcggcctggagattctacgccaccaacctctcgcgcacagacctgcactccacgtggcagtactacgagcgaacggtcaccgtgcccatgtacagttcgcaaactcaaacctacggggcctccagacttatccccccgctgaaccagctggagctgctgaggaacctcaagagtaaatctggactcgctttcaggaaggaccccccgccggagccgtctccaagccagaaggtcagtttgaaagatcgtgtcttctccagcccccgaggcgtggctgccaaggggaaggggtccccgcaggcccagactgtgaggcggtcacccagcgccgaccagagcctcgaggacagccccagcaaggtgcccaagagctggagcttcggggaccgcagccgggcacgccaggctttccgcatcaagggtgccgcgtcacggcagaactcagaagcaagcctccccggagaggacattgtggatgacaagagctgcccctgcgagtttgtgaccgaggacctgaccccgggcctcaaagtcagcatcagagccgtgtgtgtcatgcggttcctggtgtccaagcggaagttcaaggagagcctgcggccctacgacgtgatggacgtcatcgagcagtactcagccggccacctggacatgctgtcccgaattaagagcctgcagtccaggatagatatgattgtgggtcccccgcccccttcaactccccggcacaagaagtaccccaccaaaggacccacggcccctccgagagagtcaccccagtactcacctagagtggaccagatcgtggggcggggcccagcgatcacggacaaggaccgcaccaagggcccggccgaggcggagctgcccgaggaccccagcatgatgggacggctcgggaaggtggagaagcaggtcttgtccatggagaagaagctggacttcctggtgaatatctacatgcagcggatgggcatccccccgacagagaccgaggcctactttggggccaaagagccggagccggcgccgccgtaccacagcccggaagacagccgggagcatgtcgacaggcacggctgcattgtcaagatcgtgcgctccagcagctccacgggccagaagaacttctcggcgcccccggccgcgccccctgtccagtgtccgccctccacctcctggcagccacagagccacccgcgccagggccacggcacctcccccgtgggggaccacggctccctggtgcgcatcccgccgccgcctgcccacgagcggtcgctgtccgcctacggcgggggcaaccgcgccagcatggagttcctgcggcaggaggacaccccgggctgcaggccccccgaggggaacctgcgggacagcgacacgtccatctccatcccgtccgtggaccacgaggagctggagcgttccttcagcggcttcagcatctcccagtccaaggagaacctggatgctctcaacagctgctacgcggccgtggcgccttgtgccaaagtcaggccctacattgcggagggagagtcagacaccgactccgacctctgtaccccgtgcgggcccccgccacgctcggccaccggcgagggtccctttggtgacgtgggctgggccgggcccaggaagtgaggcggcgctgggccagtggacccgcccgcggccctcctcagcacggtgcctccgaggttttgaggcgggaaccctctggggcccttttcttacagtaactgagtgtggcgggaagggtgggccctggaggggcccatgtgggctgaaggatgggggctcctggcagtgaccttttacaaaagttattttccaacaggggctggagggctgggcagggccctgtggctccaggagcagcgtgcaggagcaaggctgccctgtccactctgctcagggccgcggccgacatcagcccggtgtgaggaggggcgggagtgatgacggggtgttgccagcgtggcaacaggcggggggttgtctcagccgagcccaggggaggcacaaagggcaggcctgttccctgaggacctgcgcaaagggcgggcctgtttggtgaggacctgcggccttgggtcccggtggggtttccgggcagctacaggcgggtgtggccggccgctgtgcgtggcctctgccttcacacctgacctgcccggcgggctttcctgttccccacctcaggggcgcccaaatacagagctattggttggcgtcttctccctgtaccttctgggatctgagggctctttccatggaagccagccccgaggtggagaccttcgcctgcagccgaggagcgggtggggcctgggaaccaaactggagccagagtggacgtccagccctctggtcttggcctccagagggagggcctggctcacggtggggccagggagccggctccaaagggtcttcaaaaagggggtccttgggggctccagctgcctcgccctggcctttctgtgggtgcgtgagagccagcagcaccccagccttggagaccgggggggcaggaccccaagtcctcccctctctcctgactgccctggccgggtgccggcactgcgagacccacctggtgagcaggcctcacagttcttagccagggccccacctcgcctgtgtcccaccagtgccccgacagacctggggcagggctgggccatgatgcagcgggccaggatagcctccaccgtcagcacagggccgccctccccgcctttccggaggaaaccactcccacctcagcccagctgtgcgccctccctagctctcctgccccctggagctgatggccccttctccactgaccgattccttagcggggcctcttggggtctcgggcctcgggtgcaccgtcccatgcccgtcctgttgtgggcaccgtggcccttggggcaggcggctctaatgcgggagcgagtccctagctccagacttaagaaccagaccccgggagcatctggcatttggcgtgacggcgtcgcaggcgggcctgggctccctggagagtggcctccctgggagtgagcagggctggggtcgtgggcgcaaatactcctgcagagcaagtgcaggggagtcctgggcccgtttctcctccacctgcgttttcagtgcacttggcttggctgggaggtcctgaggccctgaggccagcaggggaaccagtcctgagggagaggactttgaaagcagcatttgagggtcgtacgcccctggctggtgggggtcctggcgctcagggtgttcggggagccatgtctggcgtccattgtggggagctgctgccctggcctctctgcctacccccagcccggccagggcactcccaggccctgtcgccattgaggtgcctccgctgggctgtctcctcacccctccctgtgctggagcctgtcccaaaaaggtgccaactgggaggcctcggaagccactgtccaggctcccactgcctgtctgctctgttcccaaaggcagcgtgtgtggcctcgggccctgcggtggcatgaagcatcccttctggtgtgggcatcgctacgtgttttgggggcagcgtttcacggcggtgcccttgctgtctcccttgggctggctcgagcctggggtccatgtccctttgccgtcccgtcatggggcagggaatccatagcggggcccacaggcaggggtatgagtgcgtcccacccaacgcagcaccagccccggccaccgctccccgtgtccccagttccgtctcagctacctggactccaggaccctggagaagggagacctggcagtggagggaggctgtgctgtgtgtccccctgcaggtgtgaccccgcctgctctttcctcccccgccaggtgtggccccgcctgctctttcctcccccaccagtatggccccacctgctctttcctccccccccaaggtgtggccccacctgttctttcctcccctgccgaggtgtgaccccacctgctctttcctccctcccagtatggccccacctgctctttcctcccccgaggtgaggccccgcctgctctttcctcccatggggccgctgaggcatgagcacctgggcacaggttggggctctgcaggatgaggaagacaggccaatcccttccctcccagaagctggccgcccagcaggagggactgaggccagactcatgtccagcaaggaacgtgtggtgtgtcccctgggaagtctctgggccctgggaagagggaaggtgcacgtcctgggatggttgcggggccctgttttgggagacaaaggggtagagggtctgtcttgggcccccccagactctagcctgagcagtgcagccacctactgccccacctcagagaagtgcagcgggaaggaggctggaggtggtgcggcgctgcctcgggtgtctgcgtgaatgagcgtggccaaggaccagtgccacctcatggcaaagagctcccgcagtgtttgttagagtgcacatccctacgtgcccactggcacacacacgtgctcacatacatgtccgcatacaggcgtacacatgcacgcttgcacacatgcacacagaccacatagcacacatgtgcactgaccacacctgtatagaccatgcacagtacacatacgtgcatacacatgcctgcatacaggcatacacatgcacgcttacatgtacacgtgcacagatcacacacatgcacacacgtgtagctcacacacagtatacacatacacaagtgcacagaccacacacagcactaacacatgcacacacaaagtgcataggccacacagcacatgcacacaggtgcacagaccacacagcacacacaagtgcacagagcacactgcacacatgcacacacacacgcgtgcatgcacactcctcgcacttccagccttggagcccttctgtctctggtctttctctttgaccctgctgagtgtaagctgcctggggaggggctacaaggagtaattgtggctttaggggtcgtggtgatgctggaatgtcaagcgccgtcgtggggtatccgactgtccgggctcctggtccgcagtggcagagcgccaggcagagcccaatcagggtctcgtgctgcccttccctcccacagcctggcagccatccagaggaggggctctaccagatgccaaggtgccccggtgtctgtatgggtgtccggttgggtcctgtgtttggtctgccctggaggtgctgggccctcctgggatgggtggctcagcctcgaatcccaggccccagcccaggcaggtgctgctgcctgttgtggtttcctggcccagcttctccttctccctctgcataaaatcacagtccgtgagtcttccagctgccaccacggctgggacacgctgggggagggctcctcccatgcctcctgcacacagccgtctgagcagggcaggtgcccaacaccccccaccggaggacacgctgcccctcagcgatgcccctaccttttggggggcctcgtctcaagcccccccttggaggctgaaatcaccccaggcactgtgagggcttctccagggggcaccctttgagctgtgggtctgatcaccccaagtcccgcccggaggagaggcacagccagggcgtgtggtttaatgtttgcccccttcggggctggaggtctcagtgtttctagattccagaccctgctgccagagagacctgctgccggagagaaggggaggaggactccagctgggctcggtcccccacagtcagggacccccataaaggacacccccttctctctagaaagagctgggctctcagctatttctagttgcttcccagaagccgaggagcagaaggagctgtgagagctttgcagaaacgcccttgtccccgccctcctgagctatgaatgccgtacagagcagaggctggggcattggcaagatcacaggttgatgctgcacagccccattgacacaaaccctcaaagcagacgtgagagggacggttcacaaagctcggacctgccgtggagggtgcccggcagacgtggcgtgagagggacggctcacgaggcttggacctgctgtggagggtgcccagcagacgtggtgtgagaggaacggctcacgagacttggacctggtggagggtgcccagcagacgtggtgtgagagggacggctcacagggcttggacctgccatggagggtgcccggcagacgtggtgtgagagggatggttcacagggcttggacctgccatggagggtgcccggcagatgtggtgggagagagatggctcatgaggcttggacctgccgtggagggtgcccagcagacgtggtatgagagggatggctcacgaggcttggacctggtggagggtgcccggcagacgtgtgagagggacggttcacaaggcttggacctgccatggagggtgcccagcagacgtggtgtgagagggacagctcacgaggcttggacctgctgtggagggtgcccagcagggggctgagctctgaggggtgggtgctcagtgcacgggtgcccccagtgtcctctgatcctgtccggtgcctcccccaacccccacacccatgcagaactcccaggtcacatgcacgtatgtccagggcatgggggtggcgtgaagaggcctggtcagggcctttaggggctgcaggacggaatggccgcctggggagcctgtgtggctgtgccgggcagccatcctgcattcccacccagcgcgcagtctccacctcggccccagcaaagcgctaagcagccggagagacagccagggcggcttcctgaaggatgtgggatggtggactccggggtcgagggaatacgcaggttcctgtccctccgggagacctagagaagctgcacacccaggagctttccatgacccgggagcatgagtgaatgggggttccagtttgctgaactttgccgtcttgtaagggtgggggctgacggccgaccctgggaggaggtgacatcgccgggggaggttgtgggcaacggtggaggaggagagacgggaggggaccatttgggatggaggggcctcttcagagttttaaaaggcgtttgtggggtggagttgagtgtgctctgggcttggacacttgccgtggtgcccctggctggccgaggagactggctctggccaggggccccgtcctgagaggtcctcagcgtctgactctcggccaggcgccagcaaggaggggccggtccccggggctaccaggcaggcacgtgcacatcgccatcgccacacgccaactccgcctgggttttacaaagtcgttgccttaatgcatgtggacaggaactccctgaggtcgccccatgccccctggctgtgccaggtacggacgccctggaccctgcgaacaggtggggcgggcgaggggcccaagggacgggctccagagacacgcgcagggcaggaggggtctcacggaggggtctcgcactgaggcgcccagagctggtggtcccgctggacgccatccctctgcccgggatccacacggcccacgtgtgcccgccatgcccgcgccccacgccattgcagtctgccatcctctggccgtgacggtggctgcagcttccccatttgcgccgttgcctctggctgtctgcacttttgttcatgctccaaagaacatttcataatgccttcagtaccgacgtacacttctgaccattttgtatgtgtccttgtgccgtagtgaccaggcctttttttggtggatgtgttaccccgcacacttcaatctcaactttgtgcaccgtccattttctagggatagacgcccagggaatgaactctagttttctaacagattagctgagatattaacttactcacacggacaggttgatgccagagccgtaagaatgcgccagtgcgggtttgcgggggacttcgggtgtggggtcctgcggccgcgatggccgtggaaggttctggggatccctgctgccacggggacgagttcggacgccaggtggacctgtgcactcagtaaaacgcagtgattcaacctgga

SEQ ID NO: 3041 - RNA, 9201 nt, Homo sapiens
  source 1..9201: mol_type = mRNA
agcgtctccgcgcgcggcccaagcccggcaggagtgcggaaccgccgcctcggccatgcggctcccggccggggggcctgggctggggcccgcgccgccccccgcgctccgcccccgctgagcctgagcccgacccggggcgcctcccgccaggcaccatggtgcagaagtcgcgcaacggcggcgtataccccggcccgagcggggagaagaagctgaaggtgggcttcgtggggctggaccccggcgcgcccgactccacccgggacggggcgctgctgatcgccggctccgaggcccccaagcgcggcagcatcctcagcaaacctcgcgcgggcggcgcgggcgccgggaagccccccaagcgcaacgccttctaccgcaagctgcagaatttcctctacaacgtgctggagcggccgcgcggctgggcgttcatctaccacgcctacgtgttcctcctggttttctcctgcctcgtgctgtctgtgttttccaccatcaaggagtatgagaagagctcggagggggccctctacatcctggaaatcgtgactatcgtggtgtttggcgtggagtacttcgtgcggatctgggccgcaggctgctgctgccggtaccgtggctggagggggcggctcaagtttgcccggaaaccgttctgtgtgattgacatcatggtgctcatcgcctccattgcggtgctggccgccggctcccagggcaacgtctttgccacatctgcgctccggagcctgcgcttcctgcagattctgcggatgatccgcatggaccggcggggaggcacctggaagctgctgggctctgtggtctatgcccacagcaaggagctggtcactgcctggtacatcggcttcctttgtctcatcctggcctcgttcctggtgtacttggcagagaagggggagaacgaccactttgacacctacgcggatgcactctggtggggcctgatcacgctgaccaccattggctacggggacaagtacccccagacctggaacggcaggctccttgcggcaaccttcaccctcatcggtgtctccttcttcgcgctgcctgcaggcatcttggggtctgggtttgccctgaaggttcaggagcagcacaggcagaagcactttgagaagaggcggaacccggcagcaggcctgatccagtcggcctggagattctacgccaccaacctctcgcgcacagacctgcactccacgtggcagtactacgagcgaacggtcaccgtgcccatgtacagttcgcaaactcaaacctacggggcctccagacttatccccccgctgaaccagctggagctgctgaggaacctcaagagtaaatctggactcgctttcaggaaggaccccccgccggagccgtctccaagccagaaggtcagtttgaaagatcgtgtcttctccagcccccgaggcgtggctgccaaggggaaggggtccccgcaggcccagactgtgaggcggtcacccagcgccgaccagagcctcgaggacagccccagcaaggtgcccaagagctggagcttcggggaccgcagccgggcacgccaggctttccgcatcaagggtgccgcgtcacggcagaactcagaagaagcaagcctccccggagaggacattgtggatgacaagagctgcccctgcgagtttgtgaccgaggacctgaccccgggcctcaaagtcagcatcagagccgtgtgtgtcatgcggttcctggtgtccaagcggaagttcaaggagagcctgcggccctacgacgtgatggacgtcatcgagcagtactcagccggccacctggacatgctgtcccgaattaagagcctgcagtccaggcaagagccccgcctgcctgtccagcaggggacaagaacgggagtggaccagatcgtggggcggggcccagcgatcacggacaaggaccgcaccaagggcccggccgaggcggagctgcccgaggaccccagcatgatgggacggctcgggaaggtggagaagcaggtcttgtccatggagaagaagctggacttcctggtgaatatctacatgcagcggatgggcatccccccgacagagaccgaggcctactttggggccaaagagccggagccggcgccgccgtaccacagcccggaagacagccgggagcatgtcgacaggcacggctgcattgtcaagatcgtgcgctccagcagctccacgggccagaagaacttctcggcgcccccggccgcgccccctgtccagtgtccgccctccacctcctggcagccacagagccacccgcgccagggccacggcacctcccccgtgggggaccacggctccctggtgcgcatcccgccgccgcctgcccacgagcggtcgctgtccgcctacggcgggggcaaccgcgccagcatggagttcctgcggcaggaggacaccccgggctgcaggccccccgaggggaacctgcgggacagcgacacgtccatctccatcccgtccgtggaccacgaggagctggagcgttccttcagcggcttcagcatctcccagtccaaggagaacctggatgctctcaacagctgctacgcggccgtggcgccttgtgccaaagtcaggccctacattgcggagggagagtcagacaccgactccgacctctgtaccccgtgcgggcccccgccacgctcggccaccggcgagggtccctttggtgacgtgggctgggccgggcccaggaagtgaggcggcgctgggccagtggacccgcccgcggccctcctcagcacggtgcctccgaggttttgaggcgggaaccctctggggcccttttcttacagtaactgagtgtggcgggaagggtgggccctggaggggcccatgtgggctgaaggatgggggctcctggcagtgaccttttacaaaagttattttccaacaggggctggagggctgggcagggccctgtggctccaggagcagcgtgcaggagcaaggctgccctgtccactctgctcagggccgcggccgacatcagcccggtgtgaggaggggcgggagtgatgacggggtgttgccagcgtggcaacaggcggggggttgtctcagccgagcccaggggaggcacaaagggcaggcctgttccctgaggacctgcgcaaagggcgggcctgtttggtgaggacctgcggccttgggtcccggtggggtttccgggcagctacaggcgggtgtggccggccgctgtgcgtggcctctgccttcacacctgacctgcccggcgggctttcctgttccccacctcaggggcgcccaaatacagagctattggttggcgtcttctccctgtaccttctgggatctgagggctctttccatggaagccagccccgaggtggagaccttcgcctgcagccgaggagcgggtggggcctgggaaccaaactggagccagagtggacgtccagccctctggtcttggcctccagagggagggcctggctcacggtggggccagggagccggctccaaagggtcttcaaaaagggggtccttgggggctccagctgcctcgccctggcctttctgtgggtgcgtgagagccagcagcaccccagccttggagaccgggggggcaggaccccaagtcctcccctctctcctgactgccctggccgggtgccggcactgcgagacccacctggtgagcaggcctcacagttcttagccagggccccacctcgcctgtgtcccaccagtgccccgacagacctggggcagggctgggccatgatgcagcgggccaggatagcctccaccgtcagcacagggccgccctccccgcctttccggaggaaaccactcccacctcagcccagctgtgcgccctccctagctctcctgccccctggagctgatggccccttctccactgaccgattccttagcggggcctcttggggtctcgggcctcgggtgcaccgtcccatgcccgtcctgttgtgggcaccgtggcccttggggcaggcggctctaatgcgggagcgagtccctagctccagacttaagaaccagaccccgggagcatctggcatttggcgtgacggcgtcgcaggcgggcctgggctccctggagagtggcctccctgggagtgagcagggctggggtcgtgggcgcaaatactcctgcagagcaagtgcaggggagtcctgggcccgtttctcctccacctgcgttttcagtgcacttggcttggctgggaggtcctgaggccctgaggccagcaggggaaccagtcctgagggagaggactttgaaagcagcatttgagggtcgtacgcccctggctggtgggggtcctggcgctcagggtgttcggggagccatgtctggcgtccattgtggggagctgctgccctggcctctctgcctacccccagcccggccagggcactcccaggccctgtcgccattgaggtgcctccgctgggctgtctcctcacccctccctgtgctggagcctgtcccaaaaaggtgccaactgggaggcctcggaagccactgtccaggctcccactgcctgtctgctctgttcccaaaggcagcgtgtgtggcctcgggccctgcggtggcatgaagcatcccttctggtgtgggcatcgctacgtgttttgggggcagcgtttcacggcggtgcccttgctgtctcccttgggctggctcgagcctggggtccatgtccctttgccgtcccgtcatggggcagggaatccatagcggggcccacaggcaggggtatgagtgcgtcccacccaacgcagcaccagccccggccaccgctccccgtgtccccagttccgtctcagctacctggactccaggaccctggagaagggagacctggcagtggagggaggctgtgctgtgtgtccccctgcaggtgtgaccccgcctgctctttcctcccccgccaggtgtggccccgcctgctctttcctcccccaccagtatggccccacctgctctttcctccccccccaaggtgtggccccacctgttctttcctcccctgccgaggtgtgaccccacctgctctttcctccctcccagtatggccccacctgctctttcctcccccgaggtgaggccccgcctgctctttcctcccatggggccgctgaggcatgagcacctgggcacaggttggggctctgcaggatgaggaagacaggccaatcccttccctcccagaagctggccgcccagcaggagggactgaggccagactcatgtccagcaaggaacgtgtggtgtgtcccctgggaagtctctgggccctgggaagagggaaggtgcacgtcctgggatggttgcggggccctgttttgggagacaaaggggtagagggtctgtcttgggcccccccagactctagcctgagcagtgcagccacctactgccccacctcagagaagtgcagcgggaaggaggctggaggtggtgcggcgctgcctcgggtgtctgcgtgaatgagcgtggccaaggaccagtgccacctcatggcaaagagctcccgcagtgtttgttagagtgcacatccctacgtgcccactggcacacacacgtgctcacatacatgtccgcatacaggcgtacacatgcacgcttgcacacatgcacacagaccacatagcacacatgtgcactgaccacacctgtatagaccatgcacagtacacatacgtgcatacacatgcctgcatacaggcatacacatgcacgcttacatgtacacgtgcacagatcacacacatgcacacacgtgtagctcacacacagtatacacatacacaagtgcacagaccacacacagcactaacacatgcacacacaaagtgcataggccacacagcacatgcacacaggtgcacagaccacacagcacacacaagtgcacagagcacactgcacacatgcacacacacacgcgtgcatgcacactcctcgcacttccagccttggagcccttctgtctctggtctttctctttgaccctgctgagtgtaagctgcctggggaggggctacaaggagtaattgtggctttaggggtcgtggtgatgctggaatgtcaagcgccgtcgtggggtatccgactgtccgggctcctggtccgcagtggcagagcgccaggcagagcccaatcagggtctcgtgctgcccttccctcccacagcctggcagccatccagaggaggggctctaccagatgccaaggtgccccggtgtctgtatgggtgtccggttgggtcctgtgtttggtctgccctggaggtgctgggccctcctgggatgggtggctcagcctcgaatcccaggccccagcccaggcaggtgctgctgcctgttgtggtttcctggcccagcttctccttctccctctgcataaaatcacagtccgtgagtcttccagctgccaccacggctgggacacgctgggggagggctcctcccatgcctcctgcacacagccgtctgagcagggcaggtgcccaacaccccccaccggaggacacgctgcccctcagcgatgcccctaccttttggggggcctcgtctcaagcccccccttggaggctgaaatcaccccaggcactgtgagggcttctccagggggcaccctttgagctgtgggtctgatcaccccaagtcccgcccggaggagaggcacagccagggcgtgtggtttaatgtttgcccccttcggggctggaggtctcagtgtttctagattccagaccctgctgccagagagacctgctgccggagagaaggggaggaggactccagctgggctcggtcccccacagtcagggacccccataaaggacacccccttctctctagaaagagctgggctctcagctatttctagttgcttcccagaagccgaggagcagaaggagctgtgagagctttgcagaaacgcccttgtccccgccctcctgagctatgaatgccgtacagagcagaggctggggcattggcaagatcacaggttgatgctgcacagccccattgacacaaaccctcaaagcagacgtgagagggacggttcacaaagctcggacctgccgtggagggtgcccggcagacgtggcgtgagagggacggctcacgaggcttggacctgctgtggagggtgcccagcagacgtggtgtgagaggaacggctcacgagacttggacctggtggagggtgcccagcagacgtggtgtgagagggacggctcacagggcttggacctgccatggagggtgcccggcagacgtggtgtgagagggatggttcacagggcttggacctgccatggagggtgcccggcagatgtggtgggagagagatggctcatgaggcttggacctgccgtggagggtgcccagcagacgtggtatgagagggatggctcacgaggcttggacctggtggagggtgcccggcagacgtgtgagagggacggttcacaaggcttggacctgccatggagggtgcccagcagacgtggtgtgagagggacagctcacgaggcttggacctgctgtggagggtgcccagcagggggctgagctctgaggggtgggtgctcagtgcacgggtgcccccagtgtcctctgatcctgtccggtgcctcccccaacccccacacccatgcagaactcccaggtcacatgcacgtatgtccagggcatgggggtggcgtgaagaggcctggtcagggcctttaggggctgcaggacggaatggccgcctggggagcctgtgtggctgtgccgggcagccatcctgcattcccacccagcgcgcagtctccacctcggccccagcaaagcgctaagcagccggagagacagccagggcggcttcctgaaggatgtgggatggtggactccggggtcgagggaatacgcaggttcctgtccctccgggagacctagagaagctgcacacccaggagctttccatgacccgggagcatgagtgaatgggggttccagtttgctgaactttgccgtcttgtaagggtgggggctgacggccgaccctgggaggaggtgacatcgccgggggaggttgtgggcaacggtggaggaggagagacgggaggggaccatttgggatggaggggcctcttcagagttttaaaaggcgtttgtggggtggagttgagtgtgctctgggcttggacacttgccgtggtgcccctggctggccgaggagactggctctggccaggggccccgtcctgagaggtcctcagcgtctgactctcggccaggcgccagcaaggaggggccggtccccggggctaccaggcaggcacgtgcacatcgccatcgccacacgccaactccgcctgggttttacaaagtcgttgccttaatgcatgtggacaggaactccctgaggtcgccccatgccccctggctgtgccaggtacggacgccctggaccctgcgaacaggtggggcgggcgaggggcccaagggacgggctccagagacacgcgcagggcaggaggggtctcacggaggggtctcgcactgaggcgcccagagctggtggtcccgctggacgccatccctctgcccgggatccacacggcccacgtgtgcccgccatgcccgcgccccacgccattgcagtctgccatcctctggccgtgacggtggctgcagcttccccatttgcgccgttgcctctggctgtctgcacttttgttcatgctccaaagaacatttcataatgccttcagtaccgacgtacacttctgaccattttgtatgtgtccttgtgccgtagtgaccaggcctttttttggtggatgtgttaccccgcacacttcaatctcaactttgtgcaccgtccattttctagggatagacgcccagggaatgaactctagttttctaacagattagctgagatattaacttactcacacggacaggttgatgccagagccgtaagaatgcgccagtgcgggtttgcgggggacttcgggtgtggggtcctgcggccgcgatggccgtggaaggttctggggatccctgctgccacggggacgagttcggacgccaggtggacctgtgcactcagtaaaacgcagtgattcaacctgga

SEQ ID NO: 3042 - RNA, 9127 nt, Homo sapiens
  source 1..9127: mol_type = mRNA
ctcctaggcccaagctgtcctcctgcctcggcctcgccaagctctgggagtacaggcgtggccgccgggcctggcctgtttgcttcggatgtttcgtgtaagtggagttgtcatcgtggtgccgttttgtgcctggctttccttgccgagcctgccctcaggttccttcgtgtttagggtactccttcatcctctccgtgtctgggggccgctgcctcgtccttcctgtggccgcacggacggacctcagtttatctacccacccaccaactggatgttgggttgcgtctgccgtgaggctgctgtggacacgcggttcctcctggttttctcctgcctcgtgctgtctgtgttttccaccatcaaggagtatgagaagagctcggagggggccctctacatcctggaaatcgtgactatcgtggtgtttggcgtggagtacttcgtgcggatctgggccgcaggctgctgctgccggtaccgtggctggagggggcggctcaagtttgcccggaaaccgttctgtgtgattgacatcatggtgctcatcgcctccattgcggtgctggccgccggctcccagggcaacgtctttgccacatctgcgctccggagcctgcgcttcctgcagattctgcggatgatccgcatggaccggcggggaggcacctggaagctgctgggctctgtggtctatgcccacagcaaggagctggtcactgcctggtacatcggcttcctttgtctcatcctggcctcgttcctggtgtacttggcagagaagggggagaacgaccactttgacacctacgcggatgcactctggtggggcctgatcacgctgaccaccattggctacggggacaagtacccccagacctggaacggcaggctccttgcggcaaccttcaccctcatcggtgtctccttcttcgcgctgcctgcaggcatcttggggtctgggtttgccctgaaggttcaggagcagcacaggcagaagcactttgagaagaggcggaacccggcagcaggcctgatccagtcggcctggagattctacgccaccaacctctcgcgcacagacctgcactccacgtggcagtactacgagcgaacggtcaccgtgcccatgtacagttcgcaaactcaaacctacggggcctccagacttatccccccgctgaaccagctggagctgctgaggaacctcaagagtaaatctggactcgctttcaggaaggaccccccgccggagccgtctccaagccagaaggtcagtttgaaagatcgtgtcttctccagcccccgaggcgtggctgccaaggggaaggggtccccgcaggcccagactgtgaggcggtcacccagcgccgaccagagcctcgaggacagccccagcaaggtgcccaagagctggagcttcggggaccgcagccgggcacgccaggctttccgcatcaagggtgccgcgtcacggcagaactcagaagaagcaagcctccccggagaggacattgtggatgacaagagctgcccctgcgagtttgtgaccgaggacctgaccccgggcctcaaagtcagcatcagagccgtgtgtgtcatgcggttcctggtgtccaagcggaagttcaaggagagcctgcggccctacgacgtgatggacgtcatcgagcagtactcagccggccacctggacatgctgtcccgaattaagagcctgcagtccaggatagatatgattgtgggtcccccgcccccttcaactccccggcacaagaagtaccccaccaaaggacccacggcccctccgagagagtcaccccagtactcacctagagtggaccagatcgtggggcggggcccagcgatcacggacaaggaccgcaccaagggcccggccgaggcggagctgcccgaggaccccagcatgatgggacggctcgggaaggtggagaagcaggtcttgtccatggagaagaagctggacttcctggtgaatatctacatgcagcggatgggcatccccccgacagagaccgaggcctactttggggccaaagagccggagccggcgccgccgtaccacagcccggaagacagccgggagcatgtcgacaggcacggctgcattgtcaagatcgtgcgctccagcagctccacgggccagaagaacttctcggcgcccccggccgcgccccctgtccagtgtccgccctccacctcctggcagccacagagccacccgcgccagggccacggcacctcccccgtgggggaccacggctccctggtgcgcatcccgccgccgcctgcccacgagcggtcgctgtccgcctacggcgggggcaaccgcgccagcatggagttcctgcggcaggaggacaccccgggctgcaggccccccgaggggaacctgcgggacagcgacacgtccatctccatcccgtccgtggaccacgaggagctggagcgttccttcagcggcttcagcatctcccagtccaaggagaacctggatgctctcaacagctgctacgcggccgtggcgccttgtgccaaagtcaggccctacattgcggagggagagtcagacaccgactccgacctctgtaccccgtgcgggcccccgccacgctcggccaccggcgagggtccctttggtgacgtgggctgggccgggcccaggaagtgaggcggcgctgggccagtggacccgcccgcggccctcctcagcacggtgcctccgaggttttgaggcgggaaccctctggggcccttttcttacagtaactgagtgtggcgggaagggtgggccctggaggggcccatgtgggctgaaggatgggggctcctggcagtgaccttttacaaaagttattttccaacaggggctggagggctgggcagggccctgtggctccaggagcagcgtgcaggagcaaggctgccctgtccactctgctcagggccgcggccgacatcagcccggtgtgaggaggggcgggagtgatgacggggtgttgccagcgtggcaacaggcggggggttgtctcagccgagcccaggggaggcacaaagggcaggcctgttccctgaggacctgcgcaaagggcgggcctgtttggtgaggacctgcggccttgggtcccggtggggtttccgggcagctacaggcgggtgtggccggccgctgtgcgtggcctctgccttcacacctgacctgcccggcgggctttcctgttccccacctcaggggcgcccaaatacagagctattggttggcgtcttctccctgtaccttctgggatctgagggctctttccatggaagccagccccgaggtggagaccttcgcctgcagccgaggagcgggtggggcctgggaaccaaactggagccagagtggacgtccagccctctggtcttggcctccagagggagggcctggctcacggtggggccagggagccggctccaaagggtcttcaaaaagggggtccttgggggctccagctgcctcgccctggcctttctgtgggtgcgtgagagccagcagcaccccagccttggagaccgggggggcaggaccccaagtcctcccctctctcctgactgccctggccgggtgccggcactgcgagacccacctggtgagcaggcctcacagttcttagccagggccccacctcgcctgtgtcccaccagtgccccgacagacctggggcagggctgggccatgatgcagcgggccaggatagcctccaccgtcagcacagggccgccctccccgcctttccggaggaaaccactcccacctcagcccagctgtgcgccctccctagctctcctgccccctggagctgatggccccttctccactgaccgattccttagcggggcctcttggggtctcgggcctcgggtgcaccgtcccatgcccgtcctgttgtgggcaccgtggcccttggggcaggcggctctaatgcgggagcgagtccctagctccagacttaagaaccagaccccgggagcatctggcatttggcgtgacggcgtcgcaggcgggcctgggctccctggagagtggcctccctgggagtgagcagggctggggtcgtgggcgcaaatactcctgcagagcaagtgcaggggagtcctgggcccgtttctcctccacctgcgttttcagtgcacttggcttggctgggaggtcctgaggccctgaggccagcaggggaaccagtcctgagggagaggactttgaaagcagcatttgagggtcgtacgcccctggctggtgggggtcctggcgctcagggtgttcggggagccatgtctggcgtccattgtggggagctgctgccctggcctctctgcctacccccagcccggccagggcactcccaggccctgtcgccattgaggtgcctccgctgggctgtctcctcacccctccctgtgctggagcctgtcccaaaaaggtgccaactgggaggcctcggaagccactgtccaggctcccactgcctgtctgctctgttcccaaaggcagcgtgtgtggcctcgggccctgcggtggcatgaagcatcccttctggtgtgggcatcgctacgtgttttgggggcagcgtttcacggcggtgcccttgctgtctcccttgggctggctcgagcctggggtccatgtccctttgccgtcccgtcatggggcagggaatccatagcggggcccacaggcaggggtatgagtgcgtcccacccaacgcagcaccagccccggccaccgctccccgtgtccccagttccgtctcagctacctggactccaggaccctggagaagggagacctggcagtggagggaggctgtgctgtgtgtccccctgcaggtgtgaccccgctgctctttcctcccccgccaggtgtggccccgcctgctctttcctcccccaccagtatggccccacctgctctttcctccccccccaaggtgtggccccacctgttctttcctcccctgccgaggtgtgaccccacctgctctttcctccctcccagtatggccccacctgctctttcctcccccgaggtgaggccccgcctgctctttcctcccatggggccgctgaggcatgagcacctgggcacaggttggggctctgcaggatgaggaagacaggccaatcccttccctcccagaagctggccgcccagcaggagggactgaggccagactcatgtccagcaaggaacgtgtggtgtgtcccctgggaagtctctgggccctgggaagagggaaggtgcacgtcctgggatggttgcggggccctgttttgggagacaaaggggtagagggtctgtcttgggcccccccagactctagcctgagcagtgcagccacctactgccccacctcagagaagtgcagcgggaaggaggctggaggtggtgcggcgctgcctcgggtgtctgcgtgaatgagcgtggccaaggaccagtgccacctcatggcaaagagctcccgcagtgtttgttagagtgcacatccctacgtgcccactggcacacacacgtgctcacatacatgtccgcatacaggcgtacacatgcacgcttgcacacatgcacacagaccacatagcacacatgtgcactgaccacacctgtatagaccatgcacagtacacatacgtgcatacacatgcctgcatacaggcatacacatgcacgcttacatgtacacgtgcacagatcacacacatgcacacacgtgtagctcacacacagtatacacatacacaagtgcacagaccacacacagcactaacacatgcacacacaaagtgcataggccacacagcacatgcacacaggtgcacagaccacacagcacacacaagtgcacagagcacactgcacacatgcacacacacacgcgtgcatgcacactcctcgcacttccagccttggagcccttctgtctctggtctttctctttgaccctgctgagtgtaagctgcctggggaggggctacaaggagtaattgtggctttaggggtcgtggtgatgctggaatgtcaagcgccgtcgtggggtatccgactgtccgggctcctggtccgcagtggcagagcgccaggcagagcccaatcagggtctcgtgctgcccttccctcccacagcctggcagccatccagaggaggggctctaccagatgccaaggtgccccggtgtctgtatgggtgtccggttgggtcctgtgtttggtctgccctggaggtgctgggccctcctgggatgggtggctcagcctcgaatcccaggccccagcccaggcaggtgctgctgcctgttgtggtttcctggcccagcttctccttctccctctgcataaaatcacagtccgtgagtcttccagctgccaccacggctgggacacgctgggggagggctcctcccatgcctcctgcacacagccgtctgagcagggcaggtgcccaacaccccccaccggaggacacgctgcccctcagcgatgcccctaccttttggggggcctcgtctcaagcccccccttggaggctgaaatcaccccaggcactgtgagggcttctccagggggcaccctttgagctgtgggtctgatcaccccaagtcccgcccggaggagaggcacagccagggcgtgtggtttaatgtttgcccccttcggggctggaggtctcagtgtttctagattccagaccctgctgccagagagacctgctgccggagagaaggggaggaggactccagctgggctcggtcccccacagtcagggacccccataaaggacacccccttctctctagaaagagctgggctctcagctatttctagttgcttcccagaagccgaggagcagaaggagctgtgagagctttgcagaaacgcccttgtccccgccctcctgagctatgaatgccgtacagagcagaggctggggcattggcaagatcacaggttgatgctgcacagccccattgacacaaaccctcaaagcagacgtgagagggacggttcacaaagctcggacctgccgtggagggtgcccggcagacgtggcgtgagagggacggctcacgaggcttggacctgctgtggagggtgcccagcagacgtggtgtgagaggaacggctcacgagacttggacctggtggagggtgcccagcagacgtggtgtgagagggacggctcacagggcttggacctgccatggagggtgcccggcagacgtggtgtgagagggatggttcacagggcttggacctgccatggagggtgcccggcagatgtggtgggagagagatggctcatgaggcttggacctgccgtggagggtgcccagcagacgtggtatgagagggatggctcacgaggcttggacctggtggagggtgcccggcagacgtgtgagagggacggttcacaaggcttggacctgccatggagggtgcccagcagacgtggtgtgagagggacagctcacgaggcttggacctgctgtggagggtgcccagcagggggctgagctctgaggggtgggtgctcagtgcacgggtgcccccagtgtcctctgatcctgtccggtgcctcccccaacccccacacccatgcagaactcccaggtcacatgcacgtatgtccagggcatgggggtggcgtgaagaggcctggtcagggcctttaggggctgcaggacggaatggccgcctggggagcctgtgtggctgtgccgggcagccatcctgcattcccacccagcgcgcagtctccacctcggccccagcaaagcgctaagcagccggagagacagccagggcggcttcctgaaggatgtgggatggtggactccggggtcgagggaatacgcaggttcctgtccctccgggagacctagagaagctgcacacccaggagctttccatgacccgggagcatgagtgaatgggggttccagtttgctgaactttgccgtcttgtaagggtgggggctgacggccgaccctgggaggaggtgacatcgccgggggaggttgtgggcaacggtggaggaggagagacgggaggggaccatttgggatggaggggcctcttcagagttttaaaaggcgtttgtggggtggagttgagtgtgctctgggcttggacacttgccgtggtgcccctggctggccgaggagactggctctggccaggggccccgtcctgagaggtcctcagcgtctgactctcggccaggcgccagcaaggaggggccggtccccggggctaccaggcaggcacgtgcacatcgccatcgccacacgccaactccgcctgggttttacaaagtcgttgccttaatgcatgtggacaggaactccctgaggtcgccccatgccccctggctgtgccaggtacggacgccctggaccctgcgaacaggtggggcgggcgaggggcccaagggacgggctccagagacacgcgcagggcaggaggggtctcacggaggggtctcgcactgaggcgcccagagctggtggtcccgctggacgccatccctctgcccgggatccacacggcccacgtgtgcccgccatgcccgcgccccacgccattgcagtctgccatcctctggccgtgacggtggctgcagcttccccatttgcgccgttgcctctggctgtctgcacttttgttcatgctccaaagaacatttcataatgccttcagtaccgacgtacacttctgaccattttgtatgtgtccttgtgccgtagtgaccaggcctttttttggtggatgtgttaccccgcacacttcaatctcaactttgtgcaccgtccattttctagggatagacgcccagggaatgaactctagttttctaacagattagctgagatattaacttactcacacggacaggttgatgccagagccgtaagaatgcgccagtgcgggtttgcgggggacttcgggtgtggggtcctgcggccgcgatggccgtggaaggttctggggatccctgctgccacggggacgagttcggacgccaggtggacctgtgcactcagtaaaacgcagtgattcaacctgga

SEQ ID NO: 3043 - RNA, 8673 nt, Homo sapiens
  source 1..8673: mol_type = mRNA
gttcttggtgattggtttcattttttgcttaatcatttgcacattgtgatgcagagctaaatcgccagggtttttggggagattcttgggaaaacgttccgtgttttctgagccttttctaaggaacgccccggcggggagctgcgctcctgaagggcttcacaatgaggggatccactgagccccaacgtgactgtcctcaggggagcccttgaacccccagatagccatgcctgcagtggcagccacgcctcctgggtaaaccgagacccacctccaactgggggactggctggcatggccaaacgtcgccgattggtttgcaaagcgggacaactgcacgttttcctctctcaaatgtgtgtgcttcacacccacgccctttcccggggtcacgtccttcccaagcagggcttctgcggcgtctgaggccacatgtattattgttttgtcagcatgaatactgcaaaaaataatacatcttttaagacatgaacccaaactgtggctttggaaggaaaaggtatttttggaggaaaaaaaaaacagggatttttttccttcagaaatagggaagtgttttcttctccggacggtggagacgatggtgcaccttcctcgctggccttgcttgggcgcaagctctgccgctggggactgcacacaacaccctgggtggttgcagtgcctcagtttccctgctcccggccgtgtgctgttgccggcgcccaggactaactgtgctctcctcatttccagtaaaggcagcccgtgcagagggcccctgtgtggatgctgccccggacgctctagccagaaggtcagtttgaaagatcgtgtcttctccagcccccgaggcgtggctgccaaggggaaggggtccccgcaggcccagactgtgaggcggtcacccagcgccgaccagagcctcgaggacagccccagcaaggtgcccaagagctggagcttcggggaccgcagccgggcacgccaggctttccgcatcaagggtgccgcgtcacggcagaactcagaagaagcaagcctccccggagaggacattgtggatgacaagagctgcccctgcgagtttgtgaccgaggacctgaccccgggcctcaaagtcagcatcagagccgtgtgtgtcatgcggttcctggtgtccaagcggaagttcaaggagagcctgcggccctacgacgtgatggacgtcatcgagcagtactcagccggccacctggacatgctgtcccgaattaagagcctgcagtccaggatagatatgattgtgggtcccccgcccccttcaactccccggcacaagaagtaccccaccaaaggacccacggcccctccgagagagtcaccccagtactcacctagagtggaccagatcgtggggcggggcccagcgatcacggacaaggaccgcaccaagggcccggccgaggcggagctgcccgaggaccccagcatgatgggacggctcgggaaggtggagaagcaggtcttgtccatggagaagaagctggacttcctggtgaatatctacatgcagcggatgggcatccccccgacagagaccgaggcctactttggggccaaagagccggagccggcgccgccgtaccacagcccggaagacagccgggagcatgtcgacaggcacggctgcattgtcaagatcgtgcgctccagcagctccacgggccagaagaacttctcggcgcccccggccgcgccccctgtccagtgtccgccctccacctcctggcagccacagagccacccgcgccagggccacggcacctcccccgtgggggaccacggctccctggtgcgcatcccgccgccgcctgcccacgagcggtcgctgtccgcctacggcgggggcaaccgcgccagcatggagttcctgcggcaggaggacaccccgggctgcaggccccccgaggggaacctgcgggacagcgacacgtccatctccatcccgtccgtggaccacgaggagctggagcgttccttcagcggcttcagcatctcccagtccaaggagaacctggatgctctcaacagctgctacgcggccgtggcgccttgtgccaaagtcaggccctacattgcggagggagagtcagacaccgactccgacctctgtaccccgtgcgggcccccgccacgctcggccaccggcgagggtccctttggtgacgtgggctgggccgggcccaggaagtgaggcggcgctgggccagtggacccgcccgcggccctcctcagcacggtgcctccgaggttttgaggcgggaaccctctggggcccttttcttacagtaactgagtgtggcgggaagggtgggccctggaggggcccatgtgggctgaaggatgggggctcctggcagtgaccttttacaaaagttattttccaacaggggctggagggctgggcagggccctgtggctccaggagcagcgtgcaggagcaaggctgccctgtccactctgctcagggccgcggccgacatcagcccggtgtgaggaggggcgggagtgatgacggggtgttgccagcgtggcaacaggcggggggttgtctcagccgagcccaggggaggcacaaagggcaggcctgttccctgaggacctgcgcaaagggcgggcctgtttggtgaggacctgcggccttgggtcccggtggggtttccgggcagctacaggcgggtgtggccggccgctgtgcgtggcctctgccttcacacctgacctgcccggcgggctttcctgttccccacctcaggggcgcccaaatacagagctattggttggcgtcttctccctgtaccttctgggatctgagggctctttccatggaagccagccccgaggtggagaccttcgcctgcagccgaggagcgggtggggcctgggaaccaaactggagccagagtggacgtccagccctctggtcttggcctccagagggagggcctggctcacggtggggccagggagccggctccaaagggtcttcaaaaagggggtccttgggggctccagctgcctcgccctggcctttctgtgggtgcgtgagagccagcagcaccccagccttggagaccgggggggcaggaccccaagtcctcccctctctcctgactgccctggccgggtgccggcactgcgagacccacctggtgagcaggcctcacagttcttagccagggccccacctcgcctgtgtcccaccagtgccccgacagacctggggcagggctgggccatgatgcagcgggccaggatagcctccaccgtcagcacagggccgccctccccgcctttccggaggaaaccactcccacctcagcccagctgtgcgccctccctagctctcctgccccctggagctgatggccccttctccactgaccgattccttagcggggcctcttggggtctcgggcctcgggtgcaccgtcccatgcccgtcctgttgtgggcaccgtggcccttggggcaggcggctctaatgcgggagcgagtccctagctccagacttaagaaccagaccccgggagcatctggcatttggcgtgacggcgtcgcaggcgggcctgggctccctggagagtggcctccctgggagtgagcagggctggggtcgtgggcgcaaatactcctgcagagcaagtgcaggggagtcctgggcccgtttctcctccacctgcgttttcagtgcacttggcttggctgggaggtcctgaggccctgaggccagcaggggaaccagtcctgagggagaggactttgaaagcagcatttgagggtcgtacgcccctggctggtgggggtcctggcgctcagggtgttcggggagccatgtctggcgtccattgtggggagctgctgccctggcctctctgcctacccccagcccggccagggcactcccaggccctgtcgccattgaggtgcctccgctgggctgtctcctcacccctccctgtgctggagcctgtcccaaaaaggtgccaactgggaggcctcggaagccactgtccaggctcccactgcctgtctgctctgttcccaaaggcagcgtgtgtggcctcgggccctgcggtggcatgaagcatcccttctggtgtgggcatcgctacgtgttttgggggcagcgtttcacggcggtgcccttgctgtctcccttgggctggctcgagcctggggtccatgtccctttgccgtcccgtcatggggcagggaatccatagcggggcccacaggcaggggtatgagtgcgtcccacccaacgcagcaccagccccggccaccgctccccgtgtccccagttccgtctcagctacctggactccaggaccctggagaagggagacctggcagtggagggaggctgtgctgtgtgtccccctgcaggtgtgaccccgcctgctctttcctcccccgccaggtgtggccccgcctgctctttcctcccccaccagtatggccccacctgctctttcctccccccccaaggtgtggccccacctgttctttcctcccctgccgaggtgtgaccccacctgctctttcctccctcccagtatggccccacctgctctttcctcccccgaggtgaggccccgcctgctctttcctcccatggggccgctgaggcatgagcacctgggcacaggttggggctctgcaggatgaggaagacaggccaatcccttccctcccagaagctggccgcccagcaggagggactgaggccagactcatgtccagcaaggaacgtgtggtgtgtcccctgggaagtctctgggccctgggaagagggaaggtgcacgtcctgggatggttgcggggccctgttttgggagacaaaggggtagagggtctgtcttgggcccccccagactctagcctgagcagtgcagccacctactgccccacctcagagaagtgcagcgggaaggaggctggaggtggtgcggcgctgcctcgggtgtctgcgtgaatgagcgtggccaaggaccagtgccacctcatggcaaagagctcccgcagtgtttgttagagtgcacatccctacgtgcccactggcacacacacgtgctcacatacatgtccgcatacaggcgtacacatgcacgcttgcacacatgcacacagaccacatagcacacatgtgcactgaccacacctgtatagaccatgcacagtacacatacgtgcatacacatgcctgcatacaggcatacacatgcacgcttacatgtacacgtgcacagatcacacacatgcacacacgtgtagctcacacacagtatacacatacacaagtgcacagaccacacacagcactaacacatgcacacacaaagtgcataggccacacagcacatgcacacaggtgcacagaccacacagcacacacaagtgcacagagcacactgcacacatgcacacacacacgcgtgcatgcacactcctcgcacttccagccttggagcccttctgtctctggtctttctctttgaccctgctgagtgtaagctgcctggggaggggctacaaggagtaattgtggctttaggggtcgtggtgatgctggaatgtcaagcgccgtcgtggggtatccgactgtccgggctcctggtccgcagtggcagagcgccaggcagagcccaatcagggtctcgtgctgcccttccctcccacagcctggcagccatccagaggaggggctctaccagatgccaaggtgccccggtgtctgtatgggtgtccggttgggtcctgtgtttggtctgccctggaggtgctgggccctcctgggatgggtggctcagcctcgaatcccaggccccagcccaggcaggtgctgctgcctgttgtggtttcctggcccagcttctccttctccctctgcataaaatcacagtccgtgagtcttccagctgccaccacggctgggacacgctgggggagggctcctcccatgcctcctgcacacagccgtctgagcagggcaggtgcccaacaccccccaccggaggacacgctgcccctcagcgatgcccctaccttttggggggcctcgtctcaagcccccccttggaggctgaaatcaccccaggcactgtgagggcttctccagggggcaccctttgagctgtgggtctgatcaccccaagtcccgcccggaggagaggcacagccagggcgtgtggtttaatgtttgcccccttcggggctggaggtctcagtgtttctagattccagaccctgctgccagagagacctgctgccggagagaaggggaggaggactccagctgggctcggtcccccacagtcagggacccccataaaggacacccccttctctctagaaagagctgggctctcagctatttctagttgcttcccagaagccgaggagcagaaggagctgtgagagctttgcagaaacgcccttgtccccgccctcctgagctatgaatgccgtacagagcagaggctggggcattggcaagatcacaggttgatgctgcacagccccattgacacaaaccctcaaagcagacgtgagagggacggttcacaaagctcggacctgccgtggagggtgcccggcagacgtggcgtgagagggacggctcacgaggcttggacctgctgtggagggtgcccagcagacgtggtgtgagaggaacggctcacgagacttggacctggtggagggtgcccagcagacgtggtgtgagagggacggctcacagggcttggacctgccatggagggtgcccggcagacgtggtgtgagagggatggttcacagggcttggacctgccatggagggtgcccggcagatgtggtgggagagagatggctcatgaggcttggacctgccgtggagggtgcccagcagacgtggtatgagagggatggctcacgaggcttggacctggtggagggtgcccggcagacgtgtgagagggacggttcacaaggcttggacctgccatggagggtgcccagcagacgtggtgtgagagggacagctcacgaggcttggacctgctgtggagggtgcccagcagggggctgagctctgaggggtgggtgctcagtgcacgggtgcccccagtgtcctctgatcctgtccggtgcctcccccaacccccacacccatgcagaactcccaggtcacatgcacgtatgtccagggcatgggggtggcgtgaagaggcctggtcagggcctttaggggctgcaggacggaatggccgcctggggagcctgtgtggctgtgccgggcagccatcctgcattcccacccagcgcgcagtctccacctcggccccagcaaagcgctaagcagccggagagacagccagggcggcttcctgaaggatgtgggatggtggactccggggtcgagggaatacgcaggttcctgtccctccgggagacctagagaagctgcacacccaggagctttccatgacccgggagcatgagtgaatgggggttccagtttgctgaactttgccgtcttgtaagggtgggggctgacggccgaccctgggaggaggtgacatcgccgggggaggttgtgggcaacggtggaggaggagagacgggaggggaccatttgggatggaggggcctcttcagagttttaaaaggcgtttgtggggtggagttgagtgtgctctgggcttggacacttgccgtggtgcccctggctggccgaggagactggctctggccaggggccccgtcctgagaggtcctcagcgtctgactctcggccaggcgccagcaaggaggggccggtccccggggctaccaggcaggcacgtgcacatcgccatcgccacacgccaactccgcctgggttttacaaagtcgttgccttaatgcatgtggacaggaactccctgaggtcgccccatgccccctggctgtgccaggtacggacgccctggaccctgcgaacaggtggggcgggcgaggggcccaagggacgggctccagagacacgcgcagggcaggaggggtctcacggaggggtctcgcactgaggcgcccagagctggtggtcccgctggacgccatccctctgcccgggatccacacggcccacgtgtgcccgccatgcccgcgccccacgccattgcagtctgccatcctctggccgtgacggtggctgcagcttccccatttgcgccgttgcctctggctgtctgcacttttgttcatgctccaaagaacatttcataatgccttcagtaccgacgtacacttctgaccattttgtatgtgtccttgtgccgtagtgaccaggcctttttttggtggatgtgttaccccgcacacttcaatctcaactttgtgcaccgtccattttctagggatagacgcccagggaatgaactctagttttctaacagattagctgagatattaacttactcacacggacaggttgatgccagagccgtaagaatgcgccagtgcgggtttgcgggggacttcgggtgtggggtcctgcggccgcgatggccgtggaaggttctggggatccctgctgccacggggacgagttcggacgccaggtggacctgtgcactcagtaaaacgcagtgattcaacctg

SEQ ID NO: 3044 - DNA, 72447 bp, Homo sapiens
  source 1..72447: mol_type = genomic DNA
aggcgccgaggtgcgcgcggagcgaggtggccgcagcgtctccgcgcgcggcccaagcccggcaggagtgcggaaccgccgcctcggccatgcggctcccggccggggggcctgggctggggcccgcgccgccccccgcgctccgcccccgctgagcctgagcccgacccggggcgcctcccgccaggcaccatggtgcagaagtcgcgcaacggcggcgtataccccggcccgagcggggagaagaagctgaaggtgggcttcgtggggctggaccccggcgcgcccgactccacccgggacggggcgctgctgatcgccggctccgaggcccccaagcgcggcagcatcctcagcaaacctcgcgcgggcggcgcgggcgccgggaagccccccaagcgcaacgccttctaccgcaagctgcagaatttcctctacaacgtgctggagcggccgcgcggctgggcgttcatctaccacgcctacgtgtgagtggccggcggggcccccgtggcgacccccatggcgacccccatcggcgaccccatcggcgaccccggccaggctggctgcggcgggtttggctccctgcccctgggtctgggtccggggccggcgctccccggcgggagtgctgggccgagaccggagagcgattgtacagcgcgcgggcaggaaggattccggggtcggggccgctcaggtcggggtgggggctccaggcccgcaggacagagacgtgcggccgccccagccccctcctcagcctgggaggcccctccccgcggcctctgcgccgaacaaagggccggccggggagggacggcggcagcgctgggtctggactctccgggactctcggggacccgcggggctggggccgcccgaccaagcgagggcgggggggaggggtctggcctgtcctccgccatcctcccgagccgctctccctcagactagggtgagcttctgggttcctgagatgggggaggggccctcccatgacccccccaccccagcccgggctgagcgcagctgtctgtcctgccccctcggcgccgacgcccctccctggccccgcgaaccccctcagctcctgcgctcagctcctgcgctgtcccatctctgcagccgccggccgcccccgtgcacatcccgggctcaggacccctccttggcagagcgaggcccgggggaggggctgcggcagacctgggacccccagccctgggcctggaaggggctgtcccctcttcccgggcgaggctcagggaacggctgcctcctggggcagggctggcggggggcggccgaagcctgcgtccgtgtgcacctgggtgttcgcatgtggaattgcacggcccgctgcgtgtgcggcctgtgcggccggtgtgcacagcctccccgcgccagggcgcttgctctcccatcccagctgaacaagggacccgctgagctccgggaccggccattttgtgtgagaggcattttgggatgggagtgaggggcagactggtcacaagctggtcgggcgcccacctgggccgagaggggtgtgtgccccacgagtgtgccccagcctgcgtgtggccttgagtgtgcccttagcagaccctccgtggactgtgatatgagagggttctggggtagggagaagatcccagagggaaatgccaggccgcttacagggagggtgtctccgtggagggcccctgggcacccagcctgggactccccaagcagaagcttctccgacctcctgggtcctggaagccctgtggcccccaggaggtgagtctagcttttccagtccagggttcattcccgaatccccagatgagcttctgtgttctcaggaatggcctcccctgatggcccccacctggctgggggccaaaggggctcttggtgggccggtactggtcagccaggtccctgcccaaggtgactccccggaggagggtaggatagaacccacccccacaaccctcctgccctgacagcctggccagcgccccgctctgcgtctgacccagggttggttctgctttgagtccatgatccaagggcccagcgtggctgttcctgaggtttcccgttgggtcagcagctctccgcatggccgccccctgcctgggcctgcgtgggtcagcccctctgtctctccttcctgtctctgcctcctgagagcagcagtccagaactggggcaaagcatggggacacttgcacatgtggggtctgagccgtctcttcctgaccacccccagtccggacgggccccctctaagatagagcagcagcatgcgggggcttcaggcgagaccctcaacgtctgaacagccccgccttccagcctgcactaggcctctcctcagctcctttgctgtgggcacggagctccctgaacctccctgagctcccaggctctcctcagctcctttgctgtgggcaggggtggcttggactcagggaggcggcccctttgggagggggattttttctaagcggcggggctggagagcagggtttctggtcctgcctcgggttggacactgggggctggtctcagaacctctgcaaacctcagttttccgtcggtaacgtcggcacagctgcttctcaacccagggctttgtgaacaccactgctggggggcatcacactcttccaggccggcccagtgccctctgtgaaaggggatgtggctcagcactgctggtgcagctcaccgcccggctcccagacccctggtgtggtgtttgctgctgtccccgtggcccagcccatccttggagtgcagcccccacctccacttgggaggcctgatggccccatgtcctctggcccggcatggactggcccgtgtggcgtgttaggcagcatttggtctgtttgttcatcagctaaacggagacggagctcagttgggcctggggcagccgggagtggggggaaggccagggctccttgtgctgccgcacccagctgtggctgaatacaggtccccaggcccacctgccttttgcctattgccaccagtgtctggcttcggagaggtcaagttgtgagaacctctctgggcatccctgttggacccggggtagccactgtctggggtagagagggcggtggctgctgccccatggccccagggcttggtgggcgtcaggccaggcccctgctgcccccgctctggggaggtggggacgtccagcactgagttagagagggacttcatccactgttgctcctctgtgggagccgtggcctctgctcgcactgcctgggtgctttcccagaggctctggagacagggccttctctgagttagaagggcgtcagacctgctctctgcctggtcggggcggggtgctgggccacctctcccagacctcccaaagggagtgtgagctgcagaaatggcccgaactagcagatgatgtgcccctggggctgccgcaggggactctgggccagatcaccatggggggcccttcggagcctgaatcccgggctccagcctctctcctgcagcccatctgcgcataggactggagccgggcactgctccaccacggagttgaacctcctcgtccaggatccccgcgtgggttgctgggtgtgggaaagggagctccgctctgttcccgctgggtgcggacctcagttaccgcttagttacagcctgccagagggtcacgcagcctggttcctgtggatggggaaactgaggcagaggaaggttgagtgagctccagagttgtcctgcttaactgaaagggggggtcccagcctgagatgagagcttgggggtgcagattgcttgatcttgccagcagcccagccacgtggagtggccagagtgaagctgtgtttaaaataggccagatgggaaatctggcaccggggagggcctgtccctggggctcgctgtgccatcctggcttttgcgccaggcctcagctggggtccagggttttaggggcctctggccctgggctgcttgaccaggtgctgtgtcccatttcactgcagggaagggcctgggacggagggcctatgttcaagtcccccggtgccggggcccaggcgcttcccctcacagtcctggagaactcgggtggtgctgagcacaggccgctgggcctctttcccaccccttcattcagctctggggctggtgtgagccctcgaagggctggctggggtgggcaggcgcctggcacagtggtggggttcagacactctcttcttggtcaggctgctttgaggggtgagtgcaggcctgggctttacccagcacagagcggggccctggcaggaccagggtccagtctctgctgacggagcattgtgtgccgagaaagagactcgagtgcttgaacggccacattccccttcttcccacagcctcctgtgtaggaaatcttatggaaatttcccaaaaggtgaagaagcctcggagagttgtggtttctggggaaacctggatttctctggttcctggaccccttgggaggtctcgggcttcctcgcaggatttctgcccctcaccaaataatttaaagtgaaattactctggagtgataagacattgtacatgatgctgcttagttacacagtggagtcaatctctgtgcacattctgtgtctgtgagaggataggagctaaaggataagcagaaactctcctcctgaccattccacagtgagagcagagaaaatctgttttattagaaatcactgcaagccaatctctgcagagacgcggtctctccagaggtgccggcgccctggatatgggcactgctgggcactaaggattctcggcccccaggatgctgaccacgtgggaatcctgtctccagttttgaaaatgcttaaatcctggagtgtttcagaactggggtcacttctcacggcacaggctgagtccagtggtggagagtggcttaacatagtgattttcccagtttgttttagtcaataaacaaatgaatctatggatctccgttagtccctgtgctcctgacacgtccatggcccctgtgtgcacactcagcaagtccgtctggcagctgctcgcaagagcacggggctagcctctgccctgtaggagtgacattccatagcctcacaggagctgggctagcctcagccccataggaatgacattccacagccgtagaggagccaggctagcctcagccctgtaggagtgacgttccatagctgcacaggagccgggctagcctcagccctgtaggaatgacgttccgcagccgtagaggagccgtagaggagctgggcctgaagctgcttccagtgtggggagatgaatctgctacacagagtgggttccctcctaggaaaatgggcaagtctggaggaccaagggggacctgtgggggccttgaatatggggagaagggatatgggatggccgagctgccttgcccagaggcaggggaggggcagcctgtgccctgggccctccgaaggtccacttgaggtttgacgggaggctggggccagcggccaggccgtgtcctgttaaaggctcaggcgggagcaatgtgcccgttttgggaggatggggggcaaggatggtggggtgatgcctgcgatgtcccccgggggagaccttggccttgtgtccgacatcttgtcatcacagacagagcccaagcgtgttacctcacggggggctgtcttaactattttccagtgtgcatgccaggcagctctgagacgggaaactgctcgtgtgtgcgcggtctgtggacgcagccccgctcccctctgtgcttccgcccgtgtgagacgtgctcctgtgtggccgtgacctgtgaagaccctgcgtgacccgtggggcgtgaggctcggggagggcagggctggggctctggccgggggcgtcatcctgagactggccagcgtcgggctcctagacccgagtttccttgtctgcgtggtgggggtaacctgtctgcatctgtgtcacgtgatggccgccgggattcaacgtgtgagtcactccacacgatgcctgatgcgtgcgatgttccccaagctcgtagctgtcatcgccgtgaccgtgaggctccttcagcagagtggaaggcctcaccccggacggagcgtggaggccaggagggaggatggctggccggtccgggacggcgtcgctctgcccctccggccgattctcagtcccattggtcagcggctgggccgtgacggagaggcctgcgctgctgttgagggccaggtcgtgggttgaagtgcggggcccgggctcgagcgtcggaagcctgcgggggtcgtgggttgaagcgcggggccccggctcgagcgtgggaagcctgcgggggtcgtgggttgaagcgcggggcccgggctcgagcgtgggaagcttgcctgtttgtcgtgtgggaccggccgcggagatgccggctgttcacttggaacgaaggtgcctgccctgtgtgtgccgggtagtttgggggattgtcttcctgttcgtggcttccggcgtgttcccagcatcctgagggttgaggcttggaggacaggaatgatcttcggcttgagaaaccactgtgggcaggttttaccagggaaccccttaagctgtgaaagagctgcagtgcaagcttctagtttccacgcagaccgcgccagagaacccgccgggccgcctcgggacggcagcagaggacccgccgggacgcctcagcaccgacacgcgcccagccatgaggccgcctttagcacggagcgtcgagcggaaacggcggtgcccggaacgcggatgccctttgcagggctggagctcagctctgccttccgacaacacttggctgacagctctgggagtctcaaaacggtgcctttgtggaggggagggccctggacatcctcagaggaggaagcgcgtcctgggtagggtgggcggcacctgttcaacacgcctaacagatgcaaggtcgaaggaggaggggcctgcagatctgagcttgtcgccgaggaactctctggaaatggctcccgctggcccctgcgtgcgacccctacgctcaccagcccgtgtgccgagctttctctgttgatttcggagtgggttctggttcctgcctccctagtgggctctgagtggcagggccctgccgaccgctggcctcagcagcgggtgatggagtgtgggccctgcaggaggaggctctgtccttgatggctcctgggtgagggggtgtgagggaggcggccagcacaaggcgggtgggccctgagaagcccctctgtttcccctttagcctgagaaagctgtacccacagagctggaggagggagtggctcaggatgctgcttagcaaataggttggtctggagtctgggaaatggagggttagactttttgttttctgaagctgggatgggtcgtgcttttaattcgtccaggagaacatggggctgaagagctctctgctcttgtggcccctgatgggagtgctctgaggtctggcaggccacagagctgctgggacggcctcagccccaaacctgcgcctgtcgcttcccggggccaggccagaggtttcccagtgagagctttggggtcgacatttccaggaggagaaggcacttctgaaatagcgtgcccttggtgagcttgtgtggcttttctttctctgtaacctgctctgagttgtcccattgagtgttctggggatgtgggcatctggagcctgtggagaggacgggactgggggtgcgtgggggagacgcccctgccaaggacaggggagaccccctcagtcccacctgggagagtctgtgcgcggggctgtggttgattggctggcaagtttgaatgcggatcaatgtgccacttgtttctaagtcagcagggcccctgcccccacacactgagtggctggattctgggagccttttcctgtggagagtggagctggagtgtggggcgcagggccatggccctgttccagcgtcggggagctagtgtgcaggtgctttctcctgttagcagtgggcctgtgctgtgctccctgtggggttaggcggccccggtgggagcttcagtcttgaaaggggctcatagccctggggtgcaggctgctgtgcgtggggggcatcacacgcaggtccccaggatgatgtgtggtggaggacggggcgacgggagctctccacagagcttcatgtcccttctgttgtctaaaccacagaccccgtgccaggtgaggggctggggtgggtgaggctaaggtacctgccccgaggcctcggggcacttggcggcccctccacccccacaggagacatcggcttgagtggagaggccagcctctgagaaggcttctctctggccaccagctgcccagagctcccagcccagggccagcagcttgtgctggccccagacaggggatgctgggcggcctctcgcagggggagtggtggttttcagacagtggctgcctcgctttggggatgaggatgttttccagacgtgctctggaactgacattaggctctgctgcctacccagcttgaacaaaattaggtctttcatttttttgggttgctgggaatggctttgtggatgcataggagagcatggttgctccaggaagtccggcggggagtgggttgaacaatcggagtctcccatccctgaatcatctcagtgggggcggacgggcagctcctgggggtgtggcaggggctgggctccaggctgcccagcctgcagggagcctccttctagattcttcctctgtatctgtggcgtggaggcatctgctgcctctgtctgcccccgcctcatcctccaggtcttctctagttttgttcctccccatggagcccttacccgtgacgtaagctgaacacctgagaactttcgagcttgcttttctgtttaggtttggaaaaaacatgagaagggtgagtgggagcaaaaggccagtttctgcctggctccctgtcctgggaggaggtggggagaagcctcgggcagggatgagaggttgggatgtctgccctgaggggctgtgggcgggaggccggaggcgcctggttaatgtgtttctgcccctgtgtgcgggtgcagggttctaagctgggactcagggtgcagagggcacgtgtgtgggactttaaagtttgtcatggaggctgagccctggggaagggcagcagcactcggccggctgggcttccttctcctggagtagggtggtcagggaggcagggatatcggggagcgccaccccaggacggagcaggaggcagcctggagtcccctttgtagaccagataaggccaggcagggcctgatgtccgtattctattatttatttattttaagtgtgggggtctcgctctgtggcccaggctgagtgcagtggtgtgattgtagctcactgcagcccagaactcctgggcctgagcgatcctcctgccttgacctcctgagtagctgggagatgacccccttcttacccgttcttccagaataggtcaaattcacatgacatgtgcacacacacacacacacacacacacacacacagaaaagacacccacggaaaccctgaaatatataaaatgatgtccagccagtatgatttgccccctctgcgctgccccatctccgtaccgggtcagccatggcccatctcctggagccgttctctgcatgcgtgccacggtacagcatgtgtgtgtctgtgtgtgttcactcacttcttttcacatgtgtggagtcactccgtgtcctgccttgtgcgtgtggccccctctccctgcatgtccccctctaggctccgtcgggcgctcacgacttctctgaccggtttgcagtgatggaccttgaagcaggtgctaggactttgccgctgcaaatggtgctgcgtggggctccatgcacatcttcacgcaaggtgcaggtcggcaggatgaattcctagaagctgcctggtggctgtaaaaatgttctcatcccaaaggaccaaatatgcagagaagtttaacactcacttttcctgtcattgaaaagttacatttttgtggaaacccgtccaggctggagacagaaggtgtgtgcagggagaggaggctctggggcaccactctaggctgcctgctgctcaggtggttgatgtgggggcagatgccctgttccttggggtaggtgccacctcctccctgctccctggggtaggtgcattttcctccctgctgcctggggtaggtgccgcctcctccctgctccctggggtagatgcagcctcctccctgctgcctggggtaggtgccacctcctccctgctgcctggggtaggtgcagcctcctccctgctgcctggggtaggtgctgcctcctccctgctgcctggggtagatgcagcctcctccctgctccctggggtagatgcagcctcctccctgctccctggggtaggtgcagcctcctccctgctgccccggggtaggtgcagcctcttccctgctccctggggtgggtgcagcctcttccctgctccctggggtgggtgcagcctcctccctgctccctggggtagatgcagcctcctccctgctgcctggggtaggtgcagcctcctccctgctgcctggggtaggtgctgcctcctccctgctgcctggggtagatgcagcctcctccctgctccctggggtaggtgcagcctcctccctgctccctggggtaggtgcagcctcctccctgctgccccggggtaggtgctgcctcctccctgctgccccggggtaggtgcagcctcttccctgctccctggggtgggtgcagcctcttccctgctccctggggtaggtgcagcctcctccctgctccctggggtaggtgcagcctcctgcctgctgcccggggtaggtacagcctcctcctccctgctgcccggggtaggtgcagcctcctcctccctgctgcctggggtaggtgatatttctgccctcctacctgattaggctctggggccactcttggggatgggggaggagggccggcccccggggtgctggccatggtcctgaccaggagctgcagttgcggctcctcgtgggccagaggatccccttgtgtgattcttgtttggcatccgcccaggccatagagtcaggggcttggctcacctctgggcagctatggggaaggggctggtgtttgggaggtgcccgaggaatgatcggtggggggtggctgctggggcaaggtacacgaccggcttctctcctttacaattagcactgagccagcttatctgagaccatcccttcccacgggtgccatttaattagccaagagctgagttaagatcacgtgaagaaagttgggggggccttggcctgagcggcgggtggacagggctgcgtctgtcagggtgagggggtctggcggcccctgccgccctcgtttcttaaataaacgtttggtcgtggcttattttcttctgactgcaaagtaagcacatccaccgcaggagactgggaaagcgtggaaaacagggaaggacgtttgctcttcctggtttctttccaggtgtctgcgcccgcctgtgcgtttctaaacagaataggattcaggcggtcccgtcccgctgtggtgttaacggcatactgtccacacttctcatgggcaagatgagtctcgcgtgccaggtagttggcttgtctctgacctggggctgccgcagcacctgtccagccacctgtggacatggatgacggcagagtccctgtgttgtgtggtgtccctgcgtggatgtcgacaccacagctgtcctggggacgtgtccacatgaggcttggggaatccacatgtgtcccatccagggctgtcctgcaggccccgggtctgcctgaatgtgattaggtgatgaggccaccctggccaggaaggctggtgaggggagagggaggacgcaggctggcccaggaggggcttgtgttggaacgagattctttctgtggggtgagccctccgtcgccggaggtgtgcaagtggaggccgagagagagcactcactaggacgtttgtagggggccagggactggagctgtgagccgtggaccagctgagggcactggcctgcttgggagggggttaggcgtggctgtctcagggggctgtgggggggaaggcctgctgggagcctcggtcaggagtgccactgttggggtgccctcagcacctgaatgggtttcgggtggggctgacaggcagcttgagcccatgaagggagtgtgggatgtctcaggaggagcccccttgttgagggtggggggagcccctctccaccccagctcccctgggacctcatgaagcctttgctccccaaagctgctaagggcttgggtaaggccagggagggacctgcagggtcaggagcccaggccaggccaagcaggggtccccaaaggtgctggggatgggggtgtgcatgacagggaagctccggggctcgggtttggggaggagtaggctgggctgggatggggacactggccagggccagagccaagcttcagccacagaagaaggggcgattctacagctcacaaggtccccgggtgccgtctgcttcctgtagtgtaaacgcacctgtccacattccagccttcctaccgagacaacagcaccatggactggaggagtctggaggggacaaggtgtggtgagtgttaactctccccacccaaagctatcctattcagagagaaactgaggcacaggtgggtggacaccctaggcacagagccactgatgggcaggcaggttacctgtgtgcgcttgctgtcccagaccttgacaacacggtttattttgttttttaaaaatagaggttaaattatcctaacatgcagatagcattttaaagcgagtaattcagaggcgtttagagtggagaatttagtgatggtctgccgccaccagccctatttgaaaacttgtcaccccatgtggacactcttgccctctgccatcgtgtgccccaccctgtccctggcagttgccggtctcctgcctgtctctgtgacgtgcctgttattttattttatttaatttatttatttttgaggcagggtctcttttcgcccaggctggagtgcagtgtctcaatcacagctcactgcagcctggacctcctggactcgagccatcctccagcctccgtctcccgagtcgctgggactgcaggtgccccaccacatctggctaacttaaatcatttgtagagatggggtctcattgtgttacccaggctggtctcgaactcctaggcccaagctgtcctcctgcctcggcctcgccaagctctgggagtacaggcgtggccgccgggcctggcctgtttgcttcggatgtttcgtgtaagtggagttgtcatcgtggtgccgttttgtgcctggctttccttgccgagcctgccctcaggttccttcgtgtttagggtactccttcatcctctccgtgtctgggggccgctgcctcgtccttcctgtggccgcacggacggacctcagtttatctacccacccaccaactggatgttgggttgcgtctgccgtgaggctgctgtggacacgcggtgagtgtctctggacatttcgtcattcctcttgggacgaagcctgcgtcacatgtggccaggtgccctgggtgggccgtgccctcctcatctcagccccccagacccacacaggccccctcccggagccctcgccttgctcttcccgctgtgcggaaggtggtgcagtgacgcctgagtgtgggccccaggcctagctgccagcctgggctctcgagcaggttcaacttggccagggcagggtcttggctgccgcctgcctggatgtggggagacgcctctgtgcaggttctgggctgggcacttggggccactgtctgagcagaggatgtggggtcctgcctccgggagggcgagcagaccgctgctctggggggacagtgctcggtcaggctcagggccctggagagaatacaccagggagacttgggggctgcccggggaagggatggtcgggcagcctttcagagaaagtgacctgagattgaagcctgggggatgagggggcggctctgggacctgcgggtaggagaggattccaggcagcaggaagtgcacgtgcaaaggccctggggcagggacggcgtttgccgagggcaggaggggagcagggtggatgggtcgcgtggggtccaccatgaggcactgcagcggcctcgagggccaggccagggtggggtctatcttcagggcctggggctcgcctatgctggctgccattcccacccagcttctccacatgcttctgggatcaaagtggctggtacaggggcgcttctctgcgggctcagtgggttgggatggggcagtggagagtgggtagccggggcatgccgggaggaagagtaaagtccaggggaccccaggccaggggctgcgagcccagggaggttgcggggtcggggagggcgggccaggacctctgcatggggctgggctgggcactttggccagccctgcttggtgcaccggctgggtctctgtccagcacctgtggtctgggtgggacaggtgactaatggagaacaaatgagccctgcggagcttccgtctccagggaccgtgagcaggcgctgcgaagtcacgaggcagtgcccggggagctgatttaaccacgtgctgagccagcgggtttcctgccagggcctgggagtctgcccacagctgcagctcccagagcccctggggtgcatggcggatgccccctctttctgggccggggcgaaggccctggaaggacctgtggttgctgcagcaatgcagggggctgggggtccctgtgggccttgggcgtctgctgcgggagtggttagggagcaacgtgcaggtgggcaggacccccgcctccagctcctccactcctgttcccgagggagccacagctggctgaaggaagtggccatcctggggccatggtcagtgtggggcatcgagagccccctgagagcgcctccctgcccaggatgttggaaggagggctgtaggtgccaggtgggtgcaggcgggcataggcaggcccaggccgtttggaggccgtgagcatcaggctagcagctgggccttctgaggacctgagacttcctgacctgtgtcctgtcagggtccagttgagcacccagtgtttgggaggctcggtcccacctgggtcacctcccgtccctgccccatggccttaggctcaggtgggtgctgccggaagctccgaatgagggtggaccctggcctggcaggtacaagccacgcagtgctcagcatgaggcggctccacgcgagaggtctctgtgtgcagctctgcaggagcgtggcccttgtcccctccagccccggcggtctgcagtgatccatcacgcttggttcatgcccggttcacgcctggactctgtcagcggcgcccgcgcccgtcacttctgaggtgggaggtggcgtgtgtcctggaaacagagcagttcattagatggtgaaattagattccaggttgcagcgtggcggctgcctaatggacgaggcgagcggggcccccagggaggctcgagcagtcctggacctggtgcccactccggcctcacgctggctttctgctcatccccggggccctgctgggctcccaggtccccagccccggggaggtgcagcctcatcagcatggacattgttctggacagggaatttctgcctaaggaggctgcgtgggaccccccaggaccccctgcagtgggagaggggtgcatggtgggggccgtgcagccagccagctctggccaatccgcacgtgggcctctgagagtctccggagcctctgttttcccgactgtgaaatgggcacgtgactgtagggctgcttccctcctggcaggtcatgggtgtgctgagaagcttagcccgtggagtgggagtggggtcttgatgtcaggggcccctcctgacccaaccctggctctgtctgaggcaggggctgagggtggcggtgaggtggtgacgccttccctcctgcccgcccatccttcacgtgttccgttttcatttaactaaatacgcaagatgagatgaacagccctggccaacttgggtcagcctctggggaaggggcctgactggaggatccagagtcgcagagcgagggggctggctgtgggactgactcggggggcccagacccctcctgcgtcgagtcctcttccccaagtgcatgaagcgagtgaggagcggggtggcggcgtctgtgtcatgctttcccagaaaagaaatatccccttcaaccagaatggggaaggaaggcgggggagacctggaagcacaggagtctcccggaggtggggggcccatgagcagaggggtctcccggaggtggggggcctgtgggcagaggggcctcccggaggtggggggcccgtgggcagaggggcctcccggaggtggggggcccgtgaagcagaggggcctcccggaggtggggggcccgtgagcagaggggcctcccggaggtggggggcccgtgaagcagaggggcctcccggaggtggggggcccgtgagcagaggggcctcccggaggtggggggcccgtgagcagaggggcctcccggaggtggggggcccgtgagcacaggggtctcccggaggtggggggcccgtgagcagaggggtctcccggaggtggggggcccgtgagcagaggggcctcccggaggtggggggtccgtgagcacaggggtctcccggaggtgggggccccgtgagtagaggagtttttgcatctcaaggcctgagggtgccagcgtgggggccccaggactgtggtccggccttaactgggcggtgggggccccaggactgtggtccggccttaactgggcacccctctggcctggtgaccctttggtccctcccatgggcccctccctgccccaacttctcctctttgcacttgggtcccaggtcccaggaggagatcccccgctgctccatgctcagtctgtgactgcattcggggtgcctgatccccgccatggcctctcttgtgatctggggctgtctgatgggcacggggctgggctgtgcgtcagggacgtgcggtgagccccagccgacgcccgcggtccaggtgtccccctgcccctctgctcagtggtgggtgccagggctctgtggatcctccctgcccccaccttgactctttgcctgaatctggggctggggaccagctacttgccttatctccttggcaacggctgccagggaagctccggaagttgaacccattatcataattagcttcgaaaccctttgtgttgtaattctgggctgcagagaagctgctcggtcctcccatcgtcctcccagcgtcctcccaccgtcctcccatcctcccatcgtcttcccgccgtcctcccctcatcctcccccattctcccgtaggaagtctcttctttcttttcctgcagacttggccgctgcctgggcaggagggggcgggcagcccttgccgagccagcgagacctcagctgagtgccccgtggtgggctgtgtcccccagcttagtgcaggaggggctgtacccacactgtgggcctgggtctgaggtggtgatggccccgtcccgagaggcctctggcagctggccctcagggagtgtcccacatttggacgctcgtcgtgcctgggaccctgaggccacatgggcagggagtgtgtcccagtgttcccggggagcctcctctcccgaggcctgggggatgccatcaggggtctcctgccgccctctccctcccctggttcagaggcagaggccctcacctgcctcagtgagcctcagtttccccttctctaagatgggcatgagtgtggatgtcttggggacaccacggtttgtaggcggaggcctggaagcccctgtgtcttccccacggttcggccgaccggatggctggccagtgcgtttgggaactatccgcagtttggaggtttcttccctggtctgtcctggggcctggagccacggccgaggcaccgggatctttgcgtcccccagacgggcccagacgcaccccgtgccgcctcctccctcctccaaggctcttctcgcacgtccgtctctctgcctcccctgcaccggccgcccccggcagcgccatctgtgccatctgttccaaaaacttaaaaaacaaaagtcggagctgttgcctgcactttccgggtggggctgtggcaggaggggcagcggcgggaggggcagctgcttccttcatgcagggtctgcgggccggcgaggcgggggcagatgggcggaagctgagctggaaggagctggagccttctgagggcctggctgcgagattcatctccctgaattctggctttattcctcctggtccacgcctgctgggaggagccacagatctcggccgcatccggctgcattctgtctccagggtttctggaatgctctgagatgcctggtcggagccaccttaggaagcaggctgagtcctgaacatttgggacctgggcctcgttttttttagtttagaggaaggttccctgcagcccgaggagctgccttcctggatgcggcactgaggactcagaattcaagtctgtggggctgtcgttgtccccaccccgccctgttctcaagtctggtcagcctcatcctcggtgggatgcagatacgcctgcccttctctcgccaggcctccccagcggctcctccctctgctgggaatgcccttccccttctccccctgtggccaactcctctgtatcctgtagcccccccgcccctgtacacgcctcctccgggaagcccacaggattatgtgcgtggctctgctgggctgagctgggtccctgagcccctcctgtgatgtgtgatgccctctgtgtccccgcggcgcccctcctgcctcccaagcctctgggctcctgactgggaagccagggacccccgcgtcctcccctgctcctaccccgctgagagttcagagaaaaccccgttaggcagacagaggatcgcccgcagaaggcgcacgagatgtctgcgcatttttcccagggctcagttaattgaagaacttggccaacgagcacaggaaattaatcgcggcttggaaatgggacgtcccttgcgtatggtttgtctgcctgggcctcggcaccactgccagcgcccctgcctggagccgggagcttcggggtcctggcggaggcctctgggtcgcacacgtgggcggggccgagtgccccctggcgacggtgcctcagggccagtgccttcgagctggaagccgtgggcctgtggcggcgggcggaggactggtgtctcctggggtgcccgacacagggccttcctggtgctgctgtgccgacgtccaccgcggggcggcagctggatagggcaggacctggctgtggcttgtggtcttgggggtggcggggaggggtgcagcgtggggcaggctctggctcttggacccacccggcctccacacgcggtgctgcgctttgagcttctcactaggccctggaccctcccctcagcctgcagggactattcttcctggaagcccccgccccaacccctgcccctgcagctggagctccggctggcgcgtcgtcccgggctgaggcattctggctggcctgtgtggaggctcccagttcccacgaggagggtcccggtggggcctctctctgtggctgcaggccagctggtggggtcctgggcaggtgtgtggcctggacctgccctggagccgagctgccggcgagagacctggctctccccaccactgtccttcagcatcagtcagggtgttctgtgcctgcaccgctgaatcagcccgttcctgctgcagtcccaggcctctggccgaggcccctgtgtcctctcccagcccgtgatgcccactgtatgcatacactctgtatacacgcagctgcgccatggtgcccggctggtggccacgcacctgcctcgacgctgctgtgcaggtgtttttcggcatgaacacttagctcagcggacttcaagtgaagctagtgaccctctgccgtgggggtgggcgtcgtcccagcagctgaggccttgagagcaaagactgaggtttccggaagaaaaaggattttcctcaagaccgcaacatggaagtcgtgctgagtttccagcctgctgccctcagctcagaggcaggcactggattacagcttctcaatggcatggagctgggacgtcctcggggtgtacgtgggtagaatctgaacttgggctcacgctagagatgctgacagttttcacatgagacgctttaaaatgtggctttggcccctgcgccttcatctttggtttgggtgctgggccagagccttcacaggcacagtttctgccgccgctgcctgtggctgagcagtgccaggcctcagttggctctggtgctggaatgggcagttggtggggctgaccttggccgggccgcctgtgcccgaagcctccacctctgcttcagactgtgtggtcccgggtgcttctgaagcacggccgtggtccttcccggggcagatcttgggaggaccaccctgtgccccgccttccctgccctggacgccctgggccgtgcagcagaggccgctgctggggagtcggaaggtggagctatggggactgcgcctgcccaggccagaggactcaggctgcctggacttgggggtctccagcgagtgggaggggggctgcagggggccatgctggcctccccacatccagagggtgttcagtggggagatgactgggtccgggcagagggaagccgtgggggtgtccgtcgtgaatcgagcctggaacagcatggccaccctcttgttcttggctgaagggagcttgcccaagtccccaggtcctggaggcactttgcacacaggatgggcttgacacgaggtccacgcgggtttgtgtctttccacagggtcaggcttttattgatgctgtttcaatcacaaaagccacgagctacgtggagtccccaagcaggcaggttctccctagagcttctgggtcatgctgcggtcacggccactccatgttggtcagtgttgcagaccgtatattgccgtgtgctcatctggtcaaattccactttccacccaaagccaggtttaacatcatgaggaaaaagacacaagacagagggttaataccagcccagaggcctggcctgggctgctgcaggtgactgtgagacagcggcggtgaagacagaggcctccagggagaactgagcacggaggactggcttgtgtgtgtccttatctggttggacttggtcttcatttttttgtttgtttgtttcttttttttttttttttgggacagagtcttgctctattgcctaggctggagtgcagtggcatggtctcggctcactgcagcctccgcctcctgggttcaagcgattcttctgcctcagccttccaagtagctgggattacagacctgcgccaccatgcctggctaatttttgtatttttagtagagacagagtttcaccatattggccaggctggtttcgaactcctgatctcaagtgatctgcccgcctcggcctcctcccgaagtgctgatgcgtgagccgccatgcatggccaggttttcttcttttttgctttttggtttttaaacagacatcttatccttcttggtagagtgccctgtgagacaaaatggagtcttttcctaagatggagttagttatgccaagggctctctgcacaggtctgccctcccctgcttccaagcccccgcagcctcggctccacagacgctgctctgccagctctcacctgggcgcctgccactcttgttcaaccttgaccccaccttgaccctgtgtgacctctgcgctagggatctcctggcttcccccacccccagcaggtcttcccccacccccagcagtcttcccccaccccccagcaggtcttctggggctctgcccccaggggtgactgcagcgcccagtgctgcctcagggagtcctggcccttgcatggggcagccacagcgtcccacacctggggcagccccagggccctgggagcgggggcaggcatcagtgctgccttattcctggaagcctaaagccacttggggagggagatccagccctgacctcatgtgtggtggccttgctgggcctctgcggccgccctcgtccggcacgtgtgctgggccgtgacctctggaagagcagccagggtttcgtctaggtccctccggagcagtgggaagagggtttggggcacttcgtccctttgggtgagggaggggtgggggaggagtggtggtggaggtgaggggcctgtaagtgagggacggggtgaggcggggtgaggggcctgtaagtgagggagggggtgaggcggggtgaggggcctgcaggggcagaggcagtgagctcgtgtggtggcgggcgggttccaggggcgcaggcagcgcagggttgtgtgctgggtgtgggtgctggtgatggcactgatggtgcgggacggggtctgctctgagtgctgtgtgtcagatgtgggcccaattacgtgctccaattgctgccaccacccagtgggctggtcctggtttgggggctcagagcctgagcctggggtgatgggggccccgggtttgtgcccggatggcctggccctgtccttctgcctccgcggccaaaagtctgagaagtctccctgcaggccgcagacactggggcttccctcttccctcttctcccaggagctcagacgctggggcttttccctcttctcccgggctgtggagctcggcctttggtgagtccctcctctctctgcggtgctccccaggggctctcccacaagacagtgaagccgtgagcagagtggggtcctcttcccaccaggcaccacagccaatgctgacctctgctccccaaaccctccagaccctccaggcactgcggccaacgctgacctgtgctcactaaatagctccgcacatcgaggacttgttttttcctttttgatccgtggcagcttgtgtcacagccgcgtggcttgtctgcccagggaggagctgtgggtcagagtagcatgtggccacagcatggtggagtcaggcgtgggctcgcagcagggacacaccgatgtcagctgctcatagcgtgaaaggtcatggtcttttatttgcaaggggcagaaaacaaatgcaaagggttgtaaggaatgggcttacataacctggaagtccaaggggcttcaggcacagctggatccaggtgctcacattatgtgtcttaaggcctcttctcccatccttctgtgctgccttcctcatgacctcatcttcaggcaggttttcctgtgcccacccgtcctcctgccagtgccccaggcctgcctcctcctagttggcaacctttgtgggaagggggtgtcttattcctggtagttccagcagagattctggggccaccactcgctggccgtggttggccagcctcgatcccatgagcatccctgcacccccagactggaaaggaaattgcaaggctgagacaggaggggtgggtctagacaggtgctgtgatgctccgaagctccaatgatgagggggcgtgaccagtctggagagactcccccccaggatgcccatgcctgtggccagtgccccggcccagcaggtcaggggtgggcgtatccgggctggagggacttcccccaggatgcccgtgcctgtgcccagtctcggccctgcaggtcggggcatccagggaatatttcctctgtgggagtggggagaggggagcggggacactgcccggaacccaggctggactgcagcactgctttggggacagagggaaggagatcctgagtgtggggaatctccctcccttgacacccacctggatgtgggcgccggggaagggctcgggtttgagacacaggagggccccacaggctccgtggcggtcgtgtggtgccgcagggtgtgcaaggtgatggcgagtgtgaagacagtacaggggcgcggacacggggaagcggctgctctgtggctccgtccccgccggctcctggttctgagcacggttggaacgagaggcagcaacacggtcaaggtgaaggcgtctctcacattgcctggaatgagggcgtgtcccacgcatggcctcctttatggctgtgacgaaggacctggacgttggacacgtccccttcacatcccagaacacctgcgaaaaatgtaaatgagacaaagcatttgcttcctgcgaagtgggtttctctctggtgtgcattcagtgacttcagcacgcgggagttggctttcctgccaaagcggcagcttgaggctctgggttgcacagctttgctcccaggaagagctgggagatcttctatgtctcttctatgtgggtggccttgttgcagccacaagccgggttcccgcggcagggtcttcgggggctagcgggctcctcctgtctgcagcttcctggggtgggcaagggagcaagtgtagcagagtcgcttgtatcagaggagaatgcagggctgagaaaaagtcacgcatttgggccgagcatggtagctcatgactgtaatcccagccctttggggggccgaggcgggagcatcacttgagcccaggtgttcgagactagcctggccaatgtgatgaaaccccatctccactaaaaaaatacaaaaattagcctggtgtggtggcacatgcctgtaatcccagcaactctggaggctgaggcgggagaattgcttgaacccgggaggcggaggttgcagcgagccaagatcacgccattgcactccagcctgcgcgacaagtgaaactgtatctcaaaacaaaacaaaacaaacaaaaacaaaaatacccacatgcatttgggggaattttggtggggtgtgaacttgagcatctgaggggaaattgaagaaggatcagtgagtgaggtaatcgcgtgggacgtgaatgggaagagcaatcatggtggaagtcactggcgggaggaggtgcctgcaacccgggaggaaggagaaacggagcctcctggcagccaggacgaggctggaaagaaggtgatccgaggagctcctgttgcttggctccgggtttaactggcagagagaagccctctgcgttggggtctggaggaggtggccgagagtgaggagaggggaaggctgatcggtgccttctgccccaggggttttgcttgttcctgtgtttgtagcagttgatgggcaggccttgctgttcccatttgactgagagttttggagacgttgccaaaggatgaggctgccaggctgaaaccagacagaaggggcaggggccagagtggagaggggggtgcgtcctggagggggcagctgcgcatagagggggcagctgccactgtggagttcagggtcccgggaggtggctatgggggtgccctctggcccgagcgagctctggtggggtgggtggggagtggggtcctgcgttctggagacgcggccatgctggtgccctgctgcggcctggtggggagtggggtcctgagttctggagacacagccatgctgctgccctgctgcggcctgtctgagagcgcgcgttccctgcccccaggttcctcctggttttctcctgcctcgtgctgtctgtgttttccaccatcaaggagtatgagaagagctcggagggggccctctacatcctggtgagccccgagggagggcgggggctggaagtgcccaggaaggagctggagctgcctgggcgtctgtcttccgttcctgttactacagggcctctgacgcccccagccccagctctggccatgtctttgtgccctgtcagttcccatctgcccccagccccacagcccgggctatgccccagccccaccctggctgtaactcagccctcacctcacccctcctggtgacctcacagtggctgacagccccgcctccatcgcccccaccctgggtgggccaccctccctttcccatccccactttatctctggagccggagatgtggggcgtccccagcagacggcagacgtgggcgtcggggtgggggctgtgacgcttgcagcaaccctgtgccagggcagggtgggcgccatggcaacgggagtgcagttcctgtgttgctgttggtaacggggtggggggccctcaaggagactggtccccatccaaatgcacctccctctactgcccgccctgctcctctgttctggggcttcccaaggtctgggtggagactgtggccccctttgcagttacctggggccttccctcagctcagccctgctgtgcaccccccaactcaaggcaggtcccccactggctcagacagggtcccccagctcagacaggggcccccaactcagatagagtcccccagcttggacagggcagctccccaaccagctcagacagggtcccccagctcagacagggtcccccagctcagacagggtcccccagctcagacagggcctcccagctcagacagggtcccccagctcagacagggtcccccagctcagacagggcctcccagctcagacagggtcccccagctcagacagggtcccccagctcagacagggcctcccagctcagacagggtcccccagctcagacagggcctcccagctcagacagggtcccccagctcagacagggtcccccagctcagacagggcctcccagctcagacagggcctcccagctcagacagggttccctagcccagatagaaccccctagctcagacagggcagccctgccagctcagacatggtcccctagcccagatagagtccccagctcagacagggaggtggggagggtggccccatggtgttcatgctcagctgtgttcccggatgcagggtctccagagggcccaacccttcctgcccagaggctggagaggggtgggggggtcagcttgcagtttcctttgggggcctcctgccctgtggcttggtccctgggccagaactgctcctgtgggtgtccaggctgggcccccaggccctcccccaggcctcaaggtggcctcagctttcctcccctgcaggaaatcgtgactatcgtggtgtttggcgtggagtacttcgtgcggatctgggccgcaggctgctgctgccggtaccgtggctggagggggcggctcaagtttgcccggaaaccgttctgtgtgattggtgaggcctggtgggggtggtattgctagaatcagggccaggcacccagggacggactcagccctggggggagctggggcgtctgcgtgggccagagaggctgggcaggactggctccttctggaagtttcttttcacctgctgacttggagtcagaggctgtggttaactctgcctaaatgtcaggaagaggaatgtggcgctgggctgcccatcctgggccccacaggcagggtggacgatagtaatgtccttcctggggcctgacagagcccacaccaggcgctgggcatacaccttcccgcccctctgcacatcctcctggaacgcggggtggggagttttctccaagggggtgcggggagcggcccagcagctcaccagctccacgcccgctttgtagacatcatggtgctcatcgcctccattgcggtgctggccgccggctcccagggcaacgtctttgccacatctgcgctccggagcctgcgcttcctgcagattctgcggatgatccgcatggaccggcggggaggcacctggaagctgctgggctctgtggtctatgcccacagcaaggtgagtcacggccccaaggctggcggtgggcgcccccagccagcgagagtcctggcccagaccgggccccacccctgcctggggtttgcttcaagagccctgggtggagggatggagtcagtggtggctctggctggagcccatcaggtgtgaacgagcctccctcccctttcttctcggtgcttcttctcgtgacttgggccatctttgtcatctgtctccagaaagctgctttttcgaaaggccaggccaggccattttggcccctgccacccccaccttcctgccgcgaacccttggctctgtggttgggtgtcttctttcctgggtttttagtgcctggatcaatacaaagtgctagtcacctgcctggtggttgtttaagctgcggcttgcggcggccgctgtccgggggacccagagggtggctgtggccacacatgctgagttccaggggccccaggccccccagtgaccgagaccccatcctgccagactgtgctgtccctccaccttgctcacgggtgggctcatttgctcaaatggccccctccccattttcttccctcttgagccctggcagggtggtggctttgtctgcagaatgggcaggggtcagcccccggtggcccctctccctccctggacgctgtgggggttgagtgctgactgcagtgggcacccttttcacatctgtgcccggaggctcagggaggttgggggagggtctcaacagtcccaagattctccagccctgctggccgccagaatagacgctactgaccctggagggcacggtgggctggccgtgcgagccactgttgcccaggccaggaggctcaggggaatgggctgccgtagctaagatggtgaagccagcggcgcctcctggttcccctgtgccagccctgccaccgaccctggcgtggagcctctgctggcctcaggagacgggtccatccagcccctatatccctggagacagagcccaaagtgggctgactggcgaggctgcagtgctcctggaggcaggtggcgggtggtgatggtggtgagggtgatggtggtgatggtggtagtgatggtggtggtggtggtgatggtcatgatggtcatggtggtggtggtggtgatggtgatggtggtgatcgtggtggtggtgatggtgatggtggtggtgatgatggtggtgatggtggtgatggtgatggtggtggtgatggtgatggtgatgatggtggtgatggtgatggtggtgatggtgatggtggtggtgatgatggtggtgatgatggtgatggtggtggtggtggtgatggtggtgatggtgatggtggtggtggtgatgatggtgatggtggtggtgatgatggtgatggtgatggtggtgatgatggtggcgatggtgatgtgatggtggtgatggtgatggtggtgatcatggtggtggtggtgatggtggtggtggtggtgatggtgatggtgatgtgatggtggtggcgccggtgatggtggtggtgatgatggtggtggtggtgatagtggtggtggtgatggtgatggtggtgataatggtggtggtggtgataatggtgatggtgatgctgatgatggtgatggtggtggtgatgtgatggtggtggtgatggtgatggtggtgatggtgatggtaatggtggtgatggtggtggtggtggtgatggtgatgatggtgatggtggtggtgatggtgatggtggtgatggtgatggtggtggtgatggtggtgatggtggtggtgataatggtgatggtgatggtggtggtgatggtgatggtggtggtggtgatggtgatggtgatggtggtggtaatggtggtggtaatggtgatggtggtggtggtgatggtgatggtggtgatggtgatggtggtgatggtggaggtggtgatgatggtggtggtggtggtgatggtgatggtggtgatggtgatggtggtggtggtggtggtggtgatggtggtggtgatggttttggtggtggtgatggtggtcatggtgttgatgtgatggtggtggtgttggtggtggtgatggtgatgcttctggtgatggtggtcatgatggtggtgccgtctgcctctcaggagctggtcactgcctggtacatcggcttcctttgtctcatcctggcctcgttcctggtgtacttggcagagaagggggagaacgaccactttgacacctacgcggatgcactctggtggggcctggtgagttgtggtcattgtggttttccctttccctgctgatacacccctgtccctgtgctgggaccaggctctcactggctgagcctgctccatacatctctttggggccacctgctggctgcccgtggtcatgatggcttgtggtcgaggcggggtggtggttgccaagctggcgggggagtgggtggggagggctgggccccagagagcctgagctcagccgtggtgggcatcttccttcctcctgagctcagccgtggtgggcatcttccttcctcctgagtgaccctccacctgctccgtgtcccgattattgggggaaaggggagaagaggcatccctaggagatctgtcctgggcagccctgagtttttggagactaggtggctctgcaggccccactctgatcaggtctgaacagatctggcccctgggctcctcctcacctggggccacagacaccctcaggctgctggtgcacaggggcagggtctgtgctctcctgggaggctgagaccagaccccgggcctagccccgcacatgccggctgagtgggctcagccctgcggggaaggcatgggcagctccacctggtgcctaagccggatgcagctgatccgaagttattttattaatttcatgagacctggacactgtcttcccagtcggggcttgggtgggggttgagagctgagcgtgccccggggcccaggctgtggaccatacagatgacctggactcactgagccatcttgtgtggttcaggccccaccacagggtcagggtggggcccggggcgtcctgagctgtgactgctgggccctaggacttttgatggggacaagcccatcccccaggtcttttgtgggcaacagccttcttatctttacgattgggtgttttttcagagtaatgcttgtgtatatttttaaatgtcagagagttactaagccttatggtgagaatagagccccactctgtggccgcggtgccctcccctctgggtccctctgcagcggatgcggctgcttctgtgtttttctttggggtttacctgattagtcttaaatagcaaatagggatgctggtatttcctgattcaaacgcgctgactgtgtacctcctactgggatgagatctacccccagtttccctttcttgcagcctttgggggttttcagcagtgtggggggaaccccgccctcacctcccccgcaggccaggccccatctgccaggcctccggcttccttttccttgaatacaaaaaattagccgggtgtggtggcgggcgcctgtagtcccagctactcgggaggctgaggcaggagaatggcgtgaacctgggaggcggagcttgcagtgagccgggatcacgccactgcactccagcctgggggacagagcgagactctgtctcaaaacaaacaaacaaacaaacaaaaaaccacgcctcctttggtaacgaaattgtgtagagggctgaggccctggcttagtctccccaggagaggtttcttggtcaggcctcgcccagcctcccgcccactctgtgtggcagcctccttcccagagtctcctgtgcgctccgcgtggtggtggcagccaaggcccccaggtgctggcgctgctttgcaccaggccacagcttcctgtcggtgtggagcaggtgcggcccagccggcccaccctgtcctcagaccacacagcagcgtcctcggaacccagggtaaactccccaaggtggggctgcaggtcctggtgagaggtctccccttcccggccctgctgtctgcgctcaggcctcgatccctctgtctgtttatctaagactctgccctcacagggcctgtcctgggcccaccttctggtcctagccagagtggcctccgtgcggctgtcctgagcccgtggcttgtggtgcgtgcggttctggcaggcgggggtgggctgcggccccaacatgtccagcactgagtgcagggtgcctgcccctgccttcctcggccccggcacaggcatctcttgtcggagctgcttggagacgtgtccgtccttcgcttcccctcatccaggccccgagtcgggtgctcctgggctcaccgggacccttggggaggtccaacctggcctgacctcccccttgcccaccacccctagagaaactaagcacaacccctggggtccctgctccaggagcagcccaccccgccatggctcggtggagaccactcccccgcctcttgtggtggcctcctcctgcccacccctctcctctggcctcagctcagctcaggctcagcgagccccctgcacgccctgcccgttcctctgggtccctctgggcactcccttctccccagctgcactcttcacctggcggggatgcagtgggggctgctgtcctagccgagcctcgtgggagtcacgtcgctgggcctctggttctcgatgtgagatggggacacagcctttggctggaccccgcttctggcctgtaggggaagaggagagagggctcaggggatgaggggcggccgacaccgaccctggcctcactgggcctccgtgtggatggtgacacgggggtggccccgcatctgtcccatcccaagccccgagtcgccagcgggcgtccagcctgccctcaggggtgtgagcaggcccttcgtgtgactagagcctgcggtcccacagatcacgctgaccaccattggctacggggacaagtacccccagacctggaacggcaggctccttgcggcaaccttcaccctcatcggtgtctccttcttcgcgctgcctgcagtaagtccagctgcccctgcctgccttggagggggacgaggtcttgtaggctcccgaggtgaccacaggcccctgggcacagttccctaggtgggacctggggcaggagcagctctcagcaggtccacagcccccaggagctggaggtggcagctcagggtcagaggccttgttccccaaggactggagtgggggttccccagccccgacaggagcatgcccaaggctgcggctgtagcttcagggggctctgttagtcactggtggcccctcttagtctgagtggggctgagcaggaggtccttgtgaccaggagcagggcggctggtgacacaggtccctcatgggtctctaggcagtgaggcccacccagctcagagggaggtggaggggccctgtcaacccttgttgccccagggcagggcagggcagggcagctggtgcacggcaagaggctggccccggtgtccccttcactgtgtgcccttcaagatgggcctgcagactcttctgtgtggaagggaaagaggccactctgagttcagtgtgggtcctgccatgtctcctgcaagccagagggttccttcctcttgatgctgacaaattgtggggatatgggttcctggattagtctgaccttgatgaaggtgggggaggcatggatcggtggagacgggtctgaccctgatgaactggggggtgtgtgagtccctggggcgtggtctgaccctgatgaattggggggtgtgtgagtctctggagtgtggtctgaccctgatgaattggggggggtgtggggccccagagcatggtctgaccctgatgaattggggtgtggggggtccctggggtgtgacctgaccctgatgaattgcagggcatcttggggtctgggtttgccctgaaggttcaggagcagcacaggcagaagcactttgagaagaggcggaacccggcagcaggcctgatccaggtgagtccaggtgtcccccggggaccagcacagcccttgtcctggtcccaccttgttgaggagtggaggccgctggggctttggcattgccctgtctgtggatgggccacagcgctcaccctctgcaggaatctgtggaaggagcgaggatgtgaagtgtgtgtgttgagaaatggctccaacccctgaggctgcacaggggtggctcgtgtgaggacgctggggtggcccttgccttgtgtgggtgctggggcccggccatcaggtcctctctaccgcaccctgggaggtgagcacacccgttctgcagctgcagggccaaggctcctagagcccacacactgcagtgagtcagtgcctgacctcgtctgacccctgatgctggctgtgggcccccatgatgcccgcccggaccccacccagtgccgtcccaccatttgggggtgggtagcgtgcagtgaccactgtggcatccacaagtaattcctgagccaccttgaaaatacggacagacaatggccgggcacagtggctcacgcctgcaatcccagcactttgggaggccgaggtgggaggatcacgaggtcaggaaatcaagaccagcctggccaacatggtgaaaccctgtctctcctaaaaatacaaaaattagctgggcgtggtggcgtgcgtctgtaatcccagctactcgggaggctgaagcaggagaatcgcttgaaccagggaggcggaggttgcagtgagccgagatcacgccacagcactccagcctgggtgacagagcgagactccgtctcaaaaaaaaagagaaaatatggacagacagcaggacccccttgggaccagccattcttgcagctcctccccaaagtcttccatccactggacccgcagagctgaccaggatccctgccagcggaatgtggctataggctctctcctgtcttagacagcaaatcttgagatggagataatcctgggttaccccaggtgggccctaaatgcaatcacatgcatccttataagaaggagatttgacacagaggaggggaaagcagtgtgaccacaaaggcggagactggagacgtggccacaagccgcggagtgtcagtggccactgcaggggatgtgcctcttgtggtcttggctctgggtccagcctaccttaaggtgtgtatttatcttccactataaaaactacaaacagctatttatttccaggcaagagttttaagaagaaccaaaatgcccccaaatctcactccactattgacggtttaaaaagtgaccacgtacgtgtggtgaaaaggttacaatagtgccagaaaaagcagcgtctgagcacccagggtcccatgcgccctgcttccctcgaaggtcactcttagcagctggtgcacatttccagagcacagctgggcctctccacaggcgcacctcagaggacctgcagccgtggttccagaccactacggtagagatacggcaataaagcgagtcacacaaatttcgtggtttcccagtgcatatggaagttatgtttacaggctgggcaccgtggctcccacctgtaatcccagcactttaggaggctgaggcaggcagatctcttgaggtcaggagttcgagaccagcttagccaacatggtgaaaccccatctctactaaaaatacaaaaaaattagctgggcgtggtggcacacgcctgtaatcccagctactcaggaggctgaggcaggagaatcacttgaacccgggagacggaggttgcagtgagccgagattgcgccactgcattccagcctgggaaacagcccgagactccgtctcaaaaaaaaaaaaaaaaaaagttatgtttataccatgccatagcttactaagtgtgcagtagcattatgtctaaaaaacagtaaaacactgcacgtactttcacttacaaatacttaattgctaaaaaaatactaacaatcacctgagccttctgcgagttgcaatctttgtgctggtagggggtctcacctcgatgctggtggccactgctgatgaggtggggctgctgaaggctggggctgtggcgattttttttttttttttgagacggagtctcgctctgttgcccaggctggagtgcagtggtgcgatctcagctcactgcaagctccacctccctggttcctgccattctcctgcctcagcctcccaggtagctgggactacaggcacccaccaccacgcctggctaattttttgtatttttagtagagacggggtttcaccgtgttagccaggatggtctcgatctcctgacttcgtgatcctcccgccttggcctcccaaagtgctgggattacaggcgtgagccactgcgcccggctgtggtgatttcttaaaataaggcaagaatgaggtttgccgcatcgattcactcttcctttcacgaaagatttctctgcagcatgcgattctgttggatagcgttttacccagtggacctcctttcagcatcgcagtcagtcctctcaaatgctgccactgctgtatcaactaagtttatataatgttctcattccttgtcatttcaacacagttcacaacatctttgcctggagtagattctgtcgaccaaaaaaaaaaaaaaagaaaccacacacatgtcaaatgtatttgggaattagaagaaaggattataaccagagatgaaccactgtggccagagggtgggggactctcgagagatgagccagtgtggcgagccacccatgtgccggagagggaggggcagggaagctctccctggctgagaagttcacataagctgcttggaaacagagttcactggctctgaggctgaaaaccagagttggcagccgttcactggttgagatgccgctgctgggccagtgttcttcctagagcatcttgtctgaattgctgcattcctgataaggaattccttgtggggttattttagaatgtctttgacactgtcctcatctcagccatgcaggcgtgagccctgccgccgtgtactctctggcctcggttggtttggacctgacagaagtgaccttaccctgctgtctgcagtgttcaccgtccatcccaagaaaccacttactttgctcatccataaatgctgctcctcacctgttagagttttatcctgagatggcagcagttcagtcccgtcttcaggctccacgttaggatggccaactttttttttttgttgttgttgagatagggacttgctctcttgcccaggctggagtgcagttgtgtgatcttggctcactgcagcctcgacctgccaggttcaagcgatcctcccaccttagcctcctgagtaactgggactacaggtgtgcaccaccatatctggctaattttttgttttaagtaaaggcagggttttgccatgtttcccaggctgggcttgaactcctgggctcaggcgatccacctgcttcagcctccaaggtgttgtgagcctctgcgccaggccagggcggctgacatgttagcaaatggcaaatcagcgtagtgaggatgtgtggacaccgccccccctgctggtaggaatgtagcgatgcagtcaccctggaaagcagttcggttgtttctcagaaagttcgtaaacgtggagttgtcacgtgacccggccattctacctctaggtatagacagacacaaaagaattgaaaacagaccttcaaccaaaaacgtgcacacaaatttcacagcagcaccactcataggaaccaaaaagtggaaacagctgaaatgtctattaatggatgaacggaatgtgatttatccatacgatcctcctatcaggaggagcgggcgctgccccttgctacgacgcggatgggccgcggggacgtcacgctcagtggagggagccagacggggaaggccgtgcagcttgcgatgcccttggcaggaaatgcccggggcggggaagtccgtggagccccgtacaccctggcggtggccagggcctgggggaccaggaaccaggagcgcctgctgaacgtcgggggtaggagggggtttatttgggggcgacgaagaggtgtggagttagataggggcagtggtcgcacagcactgtgtgtgcaggcgctactgaagtgcacgctttaacatggctaacatggtgaacttcaggatatgtctatttcagcaccgcaaaacaaaacaaaggcatagagaacggaaatccagccaggcgaggttcagtctgacgtacaggctcatgccccgagccgggctgagtccccgccctgggaggttggaggctgaggtccctggccctacccatactcccagcgcctcaggttgcccagggcccaaccaggaggtcaggaaggtaacccccaggacaggtgatacccgccaggggccaggtaagagtcatgaaaaggaaagaacacagcctccctgcgagctcgctcagggccccgagtcaagccccaaccgctcccctccttcaggccccaccgtctgacaagcgggcttgcctgtctgtcctacagagggtaaactgaggctgtggggctgatgcagcactggggcctggcctgctggcccagagtcctgagtgcctggcctacagcatgggggtcccctctgccccgttccctccacgcccggccctcctgggcgcgcccctcgccgcctgcccctcgccaactgccttgtctttccctccgcagtcggcctggagattctacgccaccaacctctcgcgcacagacctgcactccacgtggcagtactacgagcgaacggtcaccgtgcccatgtacaggtaccgccgccgggcacctgccaccaagcaactgtttcattttttattttccatttgttcttaaaccccactttttgttgttcattattttgattgattttttttctttaaaatgtatttttcacaaaggagttctgtgtgtggtttatttcgaggcgttgcttctgccctttgtgttagagctgcggctttctcttcactttcatttcctcacccctttgctttatcgtcctggccgtgggtcgtgctgtgttttgtgcgttgcaaggacgctccccagggagctcaaggtaaatgccccccgccccgggctgctctggaccgacagctgctccccgggctgctctggaccggcagctcgaggtgcccaagcttcaagagtggaaccagtaccatgaccccgtcccccatcaaggacctagggctccggcgtggggggcaggaaagtaaccccggatcacagtgagactttcagaccaggaaactcaaattatcctgggggtcccaggtgttccccaacaggacagagcacacagacaaccttggagcccctcgggcagcagagaagggggcctagaaagtgcctgtcgaggcagtgctagcaggtcctgtgagcctgtgtggtcggagggcggctttcccgtgtttttttgttttacaaaagggcaggtggcagccagctgggattttcgttgcctggctcttgcttaaattaaggtctgagatgaggggttctgagggcctttctcctggtccacgcgggcctgacccctcgagtccgtctgtgtgggcaccaccttgcccgcccgccctctgctctgaggtggggaactgagccccgggacttcccagctcccgcgccccccgtcacctgctcctagggggtttctgtcccctggagccttccctaagggtggggccttccctgtgggtggagccttccctgagggtggatccttccctgggggtggggccttcccagagggtggagccttccctgagggtggggccttccctgagggtggggccttccctgagggtggagccttccctgtgggtggagccttccctgagggtggagccttccctgagggtggggccttcccagagggtggggccttccctgagggtggggccttctctgtgggtggatccttccctgagggtggggccttcccagagggtggagccttccctgtgggtggagccttccctgtgggtggatccttccctgagggtggagccttccctgagggtggggccttcccagagggtggagccttccctgtgggtggatccttccctgagggtggagccttcccagagggtggagccttccctgtgggtggagccttccctgtgggtggatccttccctgagggtggggccttccctgagggtggggccttccctgtgggtggggccttcccagagggtggagccttccctgtgggtggatccttccctgagggtggagccttcccagagggtggagccttctctgtgggtggagccttccctgagggtggggacttcccagaggctggggccttccctgtgggtggatccttccctgtgggtggagccttccctgtgggtggatccttcccagagggtggagccttccctgtgggtgtggccttccctgagggtggggccttccctgtgggtggatccttccctgagggtggggccttccctgagggtggggccttccctgtgggtggggccttccctgtgggtggagtcttccctgtgggtggatccttccctgagggtggagccttccctgtggatggggccttccctgagggtggggccttccctgcgggtggggccttccctgtgggtggatcctaccctgagggtggagccttccctgagggtggggccttccctgagggtggggccttccctgtgggcggggctttccctgagggtggggccttccctgagggtggggcaggtgcacagtgtggctgggaattctaagctggggtggggcccaggattcttcttgaggatcctgagttggccagggtggacagacccgcggcagtcctcagttgctacctgccttttcagggtgtcacttgggaggaggatgccagagcccttggcggtcctcgatgtttgcagtcgccctctggggtctgccccaacccctccctcagcaccatcccccctgcacctcctggaagcccgaccttaggagcctggccctgcttgtctttcctgggaatgtcggccatgcccttgtttctgcaaagtgacctctctcagcccagggcagggacagaaccagcccttgtgctaattttctttgttctgttgtttcccctactttcctcaactatttgtttcattttctttttcttatcccgttctttttgaaattttccgttcttttccctttgtgtgtgtggaaacacttgaaagttcgcaaactcaaacctacggggcctccaggtaggaaatgcatggacagaagccctgtgtgtgtgtgtggttctagttctgtgtctggaactgtgaccgggcaagcccctggagccccgtggcccacccggtctgcagagtgaccactgtccctgcccaccgagcatccctatgccccctgccctgcgtggccccatgctgggcggccagatcaccctgggccctcccctgcctggagcccacgtgccaaccctgccctcccagggcccatccacccttctcgtcctgcctccccccagccgctgcttcctgttgccagcccgcctgtgtcccccgtggtctcgttctgtcctgcttctggcctggctcccctcgtgcctccatccccaccccacaggccccatctgtgagcagagcaggaatgatggatggggggcttcccctgccctggcgctgggcacccatctggggccaagggtgctcccaggccaggacccccagaccagccacagtccttgtcccaccgtggctcacagggcagcctctgcgggccagctagcctcaggggtctgcctcagggtctcctgccctggactcaagtttctcctgagtcttgccctggcatcacaggggaaccccagggctccaggccgtcccacccctgtccccactgctgagagcaggaaacaaggctgtttgttcagactggagagcgctgagctgctatgggaagcctcacccccatacagcacaaagggcctttacctgtcgggtgggcaggcttgtgctctgtgatgacactgccctgcagagcctggggccagccactccccacatagaccagaagggcttcctgcacagaagcccttgatgactcctccaggggccagtcacccgtcctggaggagagacctggctgcccttcctgggaactgttagaatgttgactctccattcccagaaaggaagtgggtgcagtgctgggcagtggtgggtccagggctcctctgcccccgacatgctcagccataagacatctccaatgtctgcagaggccctgctgcccctggggccaggaggctggcgctgaagccggctgcctcctccccagcctctgctctctcccagggccgccccctccccttgttgcaccctcgtcccacagctccgtcctgccctggccctgccgcccgcctgtctgccctggcgctgctgctctgtgtgttcgaggcatggcctcctatgtggctctgagggctgacgtgtgtgtctctcacctgggcctgcgtgcgtgtgggtcccatcaaggaggggtggggagccacctgtggcccccagacagactccggccaggctgggctctgctgcgcccacaacaccagctcaccagctgcctggttcctgctccatcccgacttggacagcggactgtcctctgcagggagggggctcacaggagccccactcctgccagcattttgggggcacctctggggctgcagagggaacaaagaggggccaggcacggctttaccagctcacacctgcctagcctgtgggggggcaccagaggctggtggggtgcagggaggggcttctggacagctctggagggaggagtgtggctggacgaagtgggagtcggcagtagggtgatcaccaagccctgagggacaatggagtcagccatccttttgctttggaggcagtggggagccattgagtgtttggtcaggagagtggcaaggatgcccatctggaggaccaagtaagcctgggtgggcagaggcagggcaggtgaagagtctggaggatgtgggccacggcccagcctggggcagagggaggacacgggcaggggcatctccagggggtggccgtggccatagccgcgtagggagtcagctgggtgagggctgggctgggaggtggccgtcctgcctccaacgcagaggagagaccaggacgtggccccagtggggagtgctccacaggtgggtgtggggaggggtggaggccgtggatgggatggcagggcctgggagcagaggctgaggaggcggagtggagggggttcaggtgggtcagggagccgggtgggggaggccccagaggagggtgtctcttcctgaagcgagctggaatgctgtgagggcatgggtggtgaggaggagtgggcagagtgaggtgggtgggagtggggaggggtgaagagggggacgtcccacccagacgtgaggaggtgcctgcatacctgcctggggggcttcggcgggcccggacttggtcctgctggtggctgtgggcggcagggcaggaagacaggggtgggtatgaccaggactgggaagggggctcggagcagagctgggccacctgcggaggattcccaaggcatctgggcctgatgaggctgggctcatcctatagactccagaatgagctgctctttgccaagcagaatccttttctgtatccccacctcccaactcctccagctttggcagagaaagtggctgtgtagagaggggccggggccctaaatatattcgcgtgctgtccctctaggatgttcagggattagaagggggagtagcgcctccccctacctgcgcgccctcctccacctgctccaggctgcagggtcggggctgcatgggtggccaggcgccctcttccctcctccctgctgtccctgctggttgacaaggccccaggcacagccagagaatgaagatggctcccaggcctgcccaagagaggtgggcctgagcccagggcccagtgggcagctgcctgaaagcctggccacgtcacatgccgccgggtgtctgacactgcaggcgcctgcccatggagctgtgcaagcagagggaggtgtcccaggactcgggagggtgagacgctcactcccctctccttctcttgccccagacttatccccccgctgaaccagctggagctgctgaggaacctcaagagtaaatctggactcgctttcaggtcagctggggagctccaggtggggcgggtgggcgtctcagtcctcctgggggccccagctgcccacagaagacacgccaggacagtgccccagggactccagggagctgggacgcgcggggacgctggacttggtgatggtggtgctttctcttttcgcgtctgctgacctggtctgggctcccacccccagaggggcagctggttcgggggacgggcagagagggaggggcgaaggttgatatggggccgggggctctgcatggctcctaatggggcccaggcgcgtgggtcgtacgacaaagtgtcccagcccgtcgtcctctcgagtgcctggtggtaactcaggtgctgatggcgcctgctgcctctccttcaggcccaaagcccacggctgtcagagtgccggctgtcgaggtaggttgcagaagggcctgctgagcaggagaggtggaaggcgaatgcacctgccaggcctgcccaggcccagagccgtccccaagcagttccatgtctgaaagcccttggtggggcaggggcttccagtgggttggatgctggtttctgcctcctagagacactcttctgctctggaacctatcaggacgatctcagatcatcctggattttccgggcgggccctgagtccaacaacgagtgtccttacaaggagagggagatttggaagcacacagaggtgatagccagctaggatggagagagagactgaagtgatgcggccacaagccaagggctgcctggagccacagaagctggaagaggcagaaaggacccttccctggagctttcggagggagcaggccccgcccgcaccttgattttggactctggcgtctaggactgtgaaagaacaaacatctgttgttacacactccagcggcacttagttacaggagccgttgcacatgaatccagactttaataccgggagccgcgtgcggctgtggcaaacgcctacaagcgcgggtgtgacatcagaaccgggtgagccaagggctcgtttcctagaatcacaggttcatgcgtggaggactccagccccaggctgatgcacacctgcaatcacacacacctgatttaaatgattctgatgactttattattttatttattattattattttgagatggagtcttgctctttcgcccaggctggaatgcagtggtgcgatcttggctcactgcaacctccacttcccgggtacaagtgattctcctgcctcagcctcctgagtagctgggattacagacacctgctactacgcccggctaagttttgttatttttggtagagatggggtttcaccatgttggccaggctggtctgaagctcctgacctcaagggctctgcccgtctcggcctcccaaagtgctgggattacaggcgtgagccactgtgcccggcctctgatgacttcagatgatgaaatttgggactttttgaactgatgggatttggatgagattttggacgtgagtattttgaggtgcaggctggaagaaactgaggtgtcctgaagagatggtgggtggggacacggatgttgaaggtgcttctggtgcgggctcaggaggaagtgaggatgcaggtgttggaagctggagggaaggctgtccttgtgttgttggtggcagagactccactgggctgtgcgctactgttgggcagaggcagaatttttaagtgatgaactgggatatttagccaagaagatttccaagcaaagtgtggaaggtgcagcctaatttatttctgctgctcatagtaaagtatgagaggaaacagggagattcagagcagcacctggccgatccgccaaaagactattaaaaaaaaaaaaaaaggcattcagggcagaactgctgtaagaaaccagaacttgaaggtttgggaggtgctcagcctgtccagcttgcaaagggtcttaaattaggagattcactgttggcaaagcctgctttggagagaagcccacaggtgtggccagacagcctcatgctgaaggcaccaggtgtgcggctgcagcctccaccgtctccacagaggcctgaagatggagctatcgggaaggatgtgcagaggggcctcttgtctaacggcgttgcggcctgtggcatattcaggaggccctagaggttttggggagtttcataccagcagaaactagattggcagagacagcgttggacgaaggtaagagggcatcgaacttcgggagtctgcaggcaggaaacaggccggtggcgctcctcagctgtgaacacgagctgccctttaggaaacggggaacgatcccgaggctcccgcagaggccggcggggctgagagcccccgaggagcgtccccagagctgtgccacgtggagtttgccccgccggattggaaacgtggtggccggcggcccctctgtcattctccctttttgagtgggaagagctgtcctgctgttgatactttaagcagatggcttgttttctagttcacaagcccatgcatggaggactttagccccaggttggcgcacacccacggtctcacacatacctgatttaagtgattgtcatgacttcagaggatgggatttgggacgttttgaatgggtgggatttcttttttttttctctgagacggagtctccctgcgtcactcaggctggagtgcagtggcgcaatcacagcttactgcaacctctgcctcctgggttcaagtgattctcctccctcaacctcccgagtacctgggattacaggcacctgccaccacacccggctaatttttgtatttttagtagagacggggtttcaccatgttggtcaggctggtctcgaactcctgacctcaggtgatccacccgcctcggcctcccaaagtgctgggattacaggtgtgagccactgtgcctggccaacggatgggatttcgatgaggttttggacacacagtccatgctgcagagggtggagattttgggggatcttggcaggggtgagtgtattctcgatgtaagatggacatgaattttggggggtcgggggaatgcagtggttgaatgctggtctccaaaatgtcccagaatttgcaaatgtgacctgatttggagaaagggtccttgcagctgtaactgagcttgggatcttgagatgaggtcatcctggaacatcctgatgagcctggtgacagcttgagccctagcccggtgacagctgtccttacagaggtagaggaggagaagacacagagacacagagaatgtcgtgtagagacggaggcagagacggggcggtgcagccacaagccaaggacacctgggccaccgggagctgcaggaggtgatgagggaccctccccgagagcgtggaccatgttccacggcaacacggtccctgtcacatgaagtatttggaagtgcaccaaagagcctgcttgtaacacggcgtaccagccggggcaccagcccaggtgttcgaatgagatcgctggggcctccccatggatgagccaaatcacgatccgccgatctctcactcaatccataacgcctttacccgcggaaacagccccagatgagacgccggaaggcccagacagctttgcctgcaggacgaggccgggacagttggtcagcggtgcaaaccctgggctcactgactgtggcgcagtggagccacccctggaaagtcacgcggaagagaatcattccattaggatgagcgtggaaaaaagagtcggagcagctcactctgtctcgaaaattgattgtaaattaaactcccttccagagcttccttcagcaaacacgtgctttttggaactttattaatattggtgtggttctgattaaaatgagtgtctgtaaatgtggaggggtagagacccccaggtcagaagagcagaggcccccgccccatggagtccctcttccctctcggagctgcctccgtgggccctggggtgcccgttcctggggccgtgggctctctggggtgggtgggccagctccacccctgcccagccttttctgagacccccctcccctgcagcccctgacccatgggactgtggggggctggactggttgggggaccctcatgggtgctgagtgggcggccactaactctctgttgcttctgtttgaaggaaggaccccccgccggagccgtctccaaggtcagtgccccctgctgctaccctggtgtctgccgtgtgcacggccgtctggtctctctcccacacgtgtgcgcaacctgtcatggagatgtgagggccttgtgtgtgcttccgtgtgtgactgtgtgactgcgggtccagacccccgcctggcggtgatgtgggcccttaaatcactcttcctgctcaccccctccccagtgattcggttttactttgcagcactgtggatccgggcagctgggcggcttctcgggggtgggggatcccccaccccgcccacaagtctggccccagggttctcggaggcagggggtctctgttagtgcgctccctccagctgcaggcacatagcccgagctcacagctggcctgagtcgacgccggctggggtgaaagctccaagtgggcctctggccttcccgctgctctgggtccagagtgtctggagcatgtggcacagaccagggcccctcgtcctccgaggagggtgggacatcctctctgtctcacgcccctgggtggagattctggctggcctcctctccctgtttgccaaggtcaaagtgggccaagggtgcaggtgcttagcctggttccctctcccgggccccgaggttctgtgggtcgggcagattggagacaggactcgtgtaagggctctgctggggtgaaggatggagacagagaaaatcaagatcctttcacaagttaattctacgtctgctgagccccagcccccgacacatcaccctgaggaggtgctaggcttctctgggccccctgtgccccatccacatgttgcagagtaaatctggccccttggacctggggtccgagatggacgcctggctgcccctcctggactgcgggtgacagctggcgagacactgcggggcttgggtgcggggagatggagtggggctgagctgcatttttccagccaccccacatcccacagaaggggagtcatggtcagtgccttgagctggaaagacgggcaatgcttccggcccacaccaaccaagaaaaccaccaggggctcattcatcctctcaaagaggctaagaaaacggacgagggcccagaaagagctgggtcggcagcgtagcctctgctggtgccagcccccagtgctgccactgcctcccccgcccctgctgctggccctgaggctgggagtggctgtggggatgagcactgtgccccccacaatgggcacccttggctgtgatttgggcggaacctcggtgctgtcccaggtggacgcgaggcttcccgacggcttccgcgtggcagggccccacgcccttgctgggagcgacgccggaacccgccccgtgcctcacggcccctcgtgctcgctgccccagcccggcccgctccacgttctcgtctcagcctctctctttctctctctccctcccaccctccactccacccatctggacacccgctgcccccaagtgctttaatccctgttactgcccttctcgggcccctctctcgtctgccctctctttggggatgaggtgctggccctgaaggcgaactccaggtgaggacacgcgggagcctccgggctctccggtaagctctgtggctccccacccctcccccgtctcttccccatgtgtccggggggtccttgcctgtgcctcccacgccctcccccacgggcgagcacccacccgccccggccctcctcctgggacgcctgtggtgggggacgtggggctgctgggtctggggcttctggaaggtgcctggggtgcggtgggagtgaggagcagtctctgcccttgaagaccctccccgcccatcctggggtgctcacctggcaggtcacggggtggcatctctgttccctggcctggggcagccgcagcctgtccagtgtagggtcgtgcttaggaagttgttccgcaatcattgcctgccacgtccctgggctgctgggtgaggggcctgctctgcgaagcttgatggggagctcggctcctggcgcccctctgctgcctgacctgggctctgtgagtctggtgggacctgtgcctccgcctgccctttggaggtggagcccgcaccccgcatggcaggaccccgctggtgtcagctggtcttggcaggtggatggtgtggacacagggaccctcactcactgctgagacccccacccccatcctggctcagaacacaggcacgtggtggcaggcgacccggctggcgggggctcggttcccgtagggaccactggggctgtgctggagtcagaggaagcgtctacgttggggtcgggtggggagccaggcaggctgcggggctcgggccgtgctgccccaggggggtcccggggggtctctttggccacggcggttctgacttgtgctgtcttgtccgacaccccatctcactgcctcctgcccccgtgctggaggaggagcccccaacaccggctgccccctcatgcctgtgcgggctcccccgtgcctgttcgggctccccctcctcttctcaagcacacgtgtccgcgtgtttttggtgcatgtctgtcctgtcgggtctcggtcagtgtctgtgggtctcgagctcactgtgggcctgtccgcctgtccgacctcgggtcacagggccttctcacgcagtgtggagctccctgtggctgatggggcaggaaggaagcccagtgccagctgcggaccccagggggaggtgcagctgcacgggtcccccacaaagctttgggggtcttggggggctgtgcctgcagcgcctccctgccagctctccccggctctcagaccacgttgccccatacaggagctgccagccacatgtggctgttaaaataacatggattataacgggcacggttagagattcactctcgagtctcaggtgcctggtggcgacagccggagcttcagtgtggctacaggacgatcccattgcagaatcgggcggcagggccggcccgggaggggcctcttggtcaaggcgatcatgctggggtcaaaacaggagaccttgggaggtttggggaagcgggaccctgcctccttcatgctctttccctggggtggggaaggtctcctggggccctccaggcaggggctctgtgcttgggcctgggtggtgctggtgggagtctgaggtctttgcctgccaggaaggcctgggtgtcatcgtagctggggtggtcacagcgggagagactctgagcagccagaacctcaagccaggcgcagggagccggctccctcctgcctcgtcccaccgtcgcgttcgtggttaaccagcaaacagagtccagcctttgcactacatcccttcgtgcctggggaccccaaagtcgcttgtgtactaaaaagccggaccggcacgggggctggggtggaagccggccacccgcccttggagtcttgcaggctggtggggcttggggaagggtccagagccctcagcctacccgggcggctgagtgctgccgtgactggagctagccgtgtctgtgacgccgctcggagagctgcctgcgggtgcgtgcagggacatcggtgtctaaacacacgtgtgcgcaggaagacgggaggctgggtgctttcttcctagagcctgtgtgttctgagtggatgccgtcgccacgctggggttcctggggcaccgagtttgagaagtgctgtctcaggaagcagtggcaaggaggttgggggtggctggggtggggaaaaggaagagttcttgagttcttggtgattggtttcattttttgcttaatcatttgcacattgtgatgcagagctaaatcgccagggtttttggggagattcttgggaaaacgttccgtgttttctgagccttttctaaggaacgccccggcggggagctgcgctcctgaagggcttcacaatgaggggatccactgagccccaacgtgactgtcctcaggggagcccttgaacccccagatagccatgcctgcagtggcagccacgcctcctgggtaaaccgagacccacctccaactgggggactggctggcatggccaaacgtcgccgattggtttgcaaagcgggacaactgcacgttttcctctctcaaatgtgtgtgcttcacacccacgccctttcccggggtcacgtccttcccaagcagggcttctgcggcgtctgaggccacatgtattattgttttgtcagcatgaatactgcaaaaaataatacatcttttaagacatgaacccaaactgtggctttggaaggaaaaggtatttttggaggaaaaaaaaaacagggatttttttccttcagaaatagggaagtgttttcttctccggacggtggagacgatggtgcaccttcctcgctggccttgcttgggcgcaagctctgccgctggggactgcacacaacaccctgggtggttgcagtgcctcagtttccctgctcccggccgtgtgctgttgccggcgcccaggactaactgtgctctcctcatttccagtaaaggcagcccgtgcagagggcccctgtgtggatgctgccccggacgctctaggtaccgcggaacacgccgcacggactgacggctgctgcacggctcctctgcccctccctgcttactagaggttctggaggagccagggggaggctggcgccccaaccccaattctgacccaccgccctggcggtgcgggctcagctccctctattctagccgacagctgcgtgcagggcggagctgggggaaggtgcttcttcttgctccccacgccaggcgatgtcctgcgcacagccagaggggccagccaggggctctgaacccagcaaggcgtccgtgcctcctggggtccccgactgctcttcagggagcgtttcccctggggctgtcactctagcacctctgctgcgtacctgaggatgactgagccttcctggctgcctcgaccgcgggaggcagctccgtctgtgtgtgccgggctcctcagggtcctgatgcatcagaagccccagaaagccagaggcccgcggctccctctcccaacaacaggcctggtttagggcaggtggaaataggacgggggaggagccgccccctttgcaccgtgggctcctggcctgcaccgtgacccgcacctcccctgtccccgcgtcccctgtctgctgttgggtgtgtgcaggcctgcgctgggggcccctccctcctggccagcacagcccagcaaggtggaggtggctgtgtcgtgctcctgtggggctctccttggcatgtgcatgccgccggtggtgctggccttggagggctggtggggctgcatgctgcctatctgcatccgtgcatgcttcggaccctgctccatggggggcccgcgactccatgccaccctctccctgtgactttgctgcttgtgtgcttctgggggcgttggtgcttgcggggagactgttggcagctccagagagggagacgggcgtgtgggctgcctggggcatggcctgctggggcgctagcagctgtcctgcgtgtccggagcatctattcagggtgcttctggccgcaggctggtccctcagggcaggggctgaggtcaggctgcttggggaccagaggggtttgaaagtgggggtgggagcccaggccagagaacaacccagggcaggccctgtcctgctgcgagcagcccccacgggaggccccttcatcctcacgcttcctgggcgtcgttggtccggacaccagctgggcaggggtctggatgctcctcagcctcctgtttcctgcgggcaccgcacatctgaatttcaccattgggagggagggtggcaggccgggtggggatggcgcgctctcaggtgcttcttgagcctgccccggccccgtaagccccaagcgtaggtgccacggacgcccctcgcacacagagggcagctctggccgagggctcctcccaggtgggtggcggcagcttttcgcgtgcgcttgttcttggcttgtggccgagggagggcctgcgagaccacgcgtgctcctggcagctgaggcaggctggcggggtcgggtgtctgcagcatggagcctcaccagctgtgcttggagggtgcagagtttgggtcatggtggaggtccaggggagggaaggacatgtccaggtcgcgccaccctcctcttcctggcagagcctccctcgcagatctgaggtgggagcggagcccgagacccgggacagcagggccgcgccgaggccagggcaggctccttcccgccggctctgtctggggcagtacacgtgggctgcgtcccggcggcccctggggctgtgctgggcatcgggtccagcagggtgtgtctgccgctggcggggctgtggctccttgtcgtggtcagcggggggtcccccctgaaaaatgggaagcagacgtcggggctgggtcttctctcctggggcctgtggaatccacgccactcccttcctgcaactccctgcggactgtggggcctgacccttcctggcccgcacgtctgtgtggccgcctgggtatttgacccgttcccctccggggccgcaggtgggaatctgatgcccattcctcaagctgtgcctttcccactgcaagccctcagcaccgggctctgcccagagaccagccaagggcagccccgaagctacagttgggccgaccggctctgtcctccacccggtgctttgccagctgccgtgagaaaggaggtggctgcttctctctctggtgactggacctgcctcgggtggaaacgcagagagaggaattgagtcttccagtgactcccacttgccctgaggcctgcctgagcggggtcaggaggggcctattcttgcctttgaaatggctcgtgcggtggagaaagagagaacattccaggagtcccgctgagcctgtgcccatgtgctcccctggcccccgtccggttctccccgaccacctgtgcttttgttgttgggatggggaccagaggccgttgggacagaggcacccacagcaccaggactctgagcacccctggcccccatgggcacggtgtgttggcctcaggcagtgcaggggtgtggactcaggactggggtcctgagcgagcctgtaccatcggctcctgacgtccccaagcacgcgacgcctcgggactcgggggatctcggccactccgtctctgcttccccgagcgggcacaacacccaggggcttctttctttctctcagagacgcctgagtggggacagatggtctgctgagtgggcacagatggtctgggcggtcacctgctgcctgggggatggggtggggaggggcagccaagcgatccgcgtgtccaggccaggcagacgggcgcggtgggctctcatgtctgtggctggttatctctgtgccgtctggtgggcgtgtctctctggctgtgggtctggagtcggggctgatggtggctgctgaccggggcctcagtccctcgctgttggctggggagccgccgtgggatcagggagcccgtgaggcactgggcttcctctctgaagtgtgtcagggatctgcggggcctccccacccgaaggcttgtttcaggctccagcaacagtgctctgggccctgcccagaaccaccctgagaagttccgtggctgctaagcatggctgggcatgagcgggtccccagttcgtgagagccccactgtcctcaagggagccagggggttctgatgctttccagacctcaggaggccacatctgcctggcgtctcccaaccaccaaccacagtgaaccctcccctcccctcactgtcgcccggcggacgctggagttgaagaactcgggtgcaaacccatctccacggtcaccaaaaaactcgggggcaaggcaggcccaaggaccccccgagagtatggagctggagacccagccagacacagctgcaaatcctgcttcacgcctcgcaggccgagggggccgggccacagcgctgtggctttggaggctgcctccccctgccctggggcaggacttggatagtgaggcccagctggcggaggagccccgttatccattccttccttccagaagccggaaggagcagttctctgacacggacctggtgggaggggagcctgacaggggaggcctgagccctcctgaagcccatcccaccaggcaggcccccggggtgggtggaaaggccggagtgtggctgaacaagggtccaccgcagacttggcccccaatgtccttgttgtcccctggcccctcgactctggggcagaaggagagggacaggccgtgggaggggaggagggaggctgcttcctgggagcagttacgggtgtgaaaaggccacaggggaaaccacgggcggggccggggcagacagaggtgcccgaggaagagccacagccccggtgtttgggatgcccgttgccctgagtgtcactgggtgaggggctggcaggacagtgtgaggaaggctccggcacctcgtggtggtagcggaaagtgatttaagagtccacagacatcaactctccccacatggccaacctctggccacgcctgagccagccgggggagcttgctgcccacccagcctcccctccctccctcccgccgggtgctcagtgtctgtggcctcccctccctccctcccgccgggtgctcggtccccgtggcctcccctccctccctcccgccgggtgctcggtccccgtggcctcccctccctccctcccgccgggtgctcggccccggtagcctccccccctccctcccgccgggtgctcggtccccgtggcctcccctccctccctcccaccgggtgctcggtccccgtggcctcccctccctccctcccgccgggtgctcggtccccgtggcacctgctctgagccacccgtgtggctggctgttcttcagacctgtgtctccctccggcgcatgggcggcgtcggccatgagcagacacggcctgtgttctttgcagagtgacttctctccctgtttttctgtctgtctgtcggttcccgtgggagcagccagaaggtcagtttgaaagatcgtgtcttctccagcccccgaggcgtggctgccaaggggaaggggtccccgcaggcccagactgtgaggcggtcacccagcgccgaccagagcctcgaggacagccccagcaaggtgcccaagagctggagcttcggggaccgcagccgggcacgccaggctttccgcatcaagggtgccgcgtcacggcagaactcagaaggtgggtgtggccgcatcctctcctggtccatcctctccggggatggatgtggtggccacgctactgtggccaccctgtggcgtcgcagctgcttttgcttgctcttggagtgggaaccccctatcctttctaaaattgaggtgagacttgtgcaacctaaaattaactatttaaaagtgtaggaattcagtggcatgtagcacgctcacggtggagttgtcaccaccacctcagcctagttccagaacattctcatcaccacagaaggaaaccatgaccccatcagtagtcaccccattccccgcctcagccccagcacccgctgctcttgggccgtgcgtgtctgcggctcccacgtggggccgttgggtctggcttccttcactgagcctcagatgtcaggcctgcaccttccgccgttaacatctgtgcgtggatgcgccatgttctgttcatccattggccagaatgtcctttgacgccccatatcggccactccctgtggccacagcctgccggggaaggtcctgactcgagagcagctgggtgcagatgggtgggtttccagaaaagcaggtgcacccgaggggcaccacagggagcctcgaggggctccctggcgctctgtctagccggtgtgccctgcaggaccccgggaataggtctcccggccccctcggcccctcacggcctgtctccttccccccagaagcaagcctccccggagaggacattgtggatgacaagagctgcccctgcgagtttgtgaccgaggacctgaccccgggcctcaaagtcagcatcagagccgtgtggtgaggcccctgcccagccgggagcctgggggagtgaggaggggcctcccgctcggtggtcctgcctgctgccggtgctcatggtgctggacagagccgcccagagacagagtctactgggaaaagaaagggctaagacacgggtggacctggctgaatgtcctggagtgcactcctctgggactcaggcgggtttcgggtgggatgccggttcagcaagaggcctgaggccgggctccacctggcttaggaagcaactcagccaccttctgcctgctgtggcatggagtccaagggggcatggccaggcctgcaagccccacctgtcccgggcagagcagggccacataaaggcccttctgtgtgtggagctggtgggcggcagacaagaggggcaagtccagccatctccaggcgccgaggtctcagaggtgctaggaaggtcctggtgcctgtggccgggggtctctggcccagggctcacagccccacccacccccctgcagtgtcatgcggttcctggtgtccaagcggaagttcaaggagagcctgcggccctacgacgtgatggacgtcatcgagcagtactcagccggccacctggacatgctgtcccgaattaagagcctgcagtccaggcaagagccccgcctgcctgtccagcaggggacaagaacggggtgggcttctgggacaaagcccactgtggcccatggtgggagtgcagggggtgtgtgggcggggcctcctccccacccacgtcggcctctgtcagcttctgttgtgtcttcacaaagtctgttttaatatttctgctgtctctcccatctctcccccatccacaccgcggtgggcaagtgcgtgcacctgtgtgtgtgggtccctgaaaatgtgtgtgtgcatgtgtgtgtgtgtaagtcacgcatgcacacatgtatgcttctgcacaggtgtatgtgtgtggttgtatgcacgtgtggctctgctctgccatgtatgcacgtgtgtggggtgcatacatgtgtgtacacatgtgtgcatgtgtgttggggatggaataattctgttcagacatgaagctgcagggttcccgtgggccccaccaggcatcagttatgctacttggcaccttttcttctacctgccctccttggcataggtgtcccctaagtccacacacgtgcccacacatgtgcagcctcaggcacatacaaacaaggatatacacacgagtgggtgtttatgttgcctgtaatggggacacacggctgttgagagtctctcctgcagtaggggacatgctcctgcctatcagggtcccctccctctcccaggccccccaaccaaggctgtaccagtttctcagccctggaagcgaggctgggcccctgttacagggagaaggctgggatggtcagggacagcctgggggtcacagcccaactccgggccctccagtgggagtgaagctctcatctgaggaagtcgagagccccaccctggggctcctgcccagtcctgcttcagggggccagggaaggggcgcctccaggccttagcccactcctgctgtgcaggggccactgagccatccccttcaccccgctgggctccagctgtgaggcctctttcccagcgtcctctctggagcagcggccaaccctggctgcgtgtgcgtgtgcgtgtgtgtgcggaacgccctcctgtcttgacttctgtgctttgtctccacatctctctcacttcagctgtttttgttcaccaggatctcttgtcctaaattttccctttccttccctctctctctggaaaaacaaacaaaacaaagcaaacaccccaaggaccccaggagtcctcggccggctcctgacaatgcgtttcccgttgccccgccgcggcctgtctggtaccggctcctgctgcgggcacctcccctgcactccacgctctgggacgtggcacccgggtctccgcagtggggccgcccgccacccgctcccgagtcaaaagctttgcttgaaacacgggaaggacttggcaaatccaaggtccagcgaggcggcgtccacaccctctgtgggagagcacctgtttcgacggagcctccctgttgcttccgtttccgccagttcctggccagctcctcatttcctgtggctttacgatgcgtttcgccggtgtctcttttcttgtttactctgccaggatagatatgattgtgggtcccccgcccccttcaactccccggcacaagaagtaccccaccaaaggacccacggcccctccgagagagtcaccccagtactcacctaggttaggatgccagcgcctctccgacgtgtctgtggaatggccggccccttcgctccaggccacatgacggcagcaccttgtaccaccctttccccgggacagaggggacactcgggttttctctgttcctgaaaaagccacaagagggagaaggcccttcctccaccagggccccaggcaggctgtgcccctatcaggactgccaggggccccactgctcctctcgacaagtgccctggggaagccgggggctctgtggatgccctgtgagatttccctctggggttgggaggcccccgggcagcacctccaggatcagatgccatcagacctgcacagacatccctctggccctgcccgtgccccctggacaggcccctcctggctgagggctctccagcctccccaggcactgacctgcccctcagcacctgcccactgtgggggtgggcctggccacgtgcacggcccagacctgggccctgggtggctccgagcaggtggagccgcatctctgtgtctcttccctctcgtggaagatacagacggtcacagcatctaccccttaagccaccgggaagaagcgtgagaagaggcctgccaggtgcccggcacaggcgtgcgctccagcagctccggtgctggctttcaagctgccagcatcctaattagtgtttttgataagggagctggcgagagccccggctgatgggcagaacagaggtgcggcccagctccacgtgagctggcagaagccagttctttagtgattaactcagactttccaaggccttcttgcctcccagggactattcagatgacggtggttccctgtcttctggcaagtctgattggctgagggagggtagagcccctggggcggaggcctggaggctgagcatagacccctggccttccctgacagctcagggcagacagtttctgggtacagccaatgccagtgtctgggcaaatgaagcccaggcctgagctggtggggacggcgtctggggtgagtctgacccctcctccctctgtggtggggtttctgcctgtgaggccaagtgtctgtgcactggacatgtcagccccgtgctcctcccgtgagaacggagtttctgggagcaggcagggccgtgtctgttactgcccaacccagggtagccccggacggagtttgccgggttccctgctctgtggtgtcccccatgcccaagagtgctgtgccctggggctggtcctccgtcctcctgtgccttgccgcaagagacagcagctgggcatccacagctgtgagctcggacggtcttgtggctaggagacgtgcaggttcacacagggggccagggagacagttggagcgcttgccccacctcacggggcactgagcactcagggatcaagtctcctccagccaggggcccagggcaggaggggcacagggtccttggaggagcccccagcagcagctccaggctgagcccgtggccagggctcctattgggactgagcaggcgggcggcccgtcatgtggcaggggcgaaggtgctgagcatctgcctggactgtgtggatgccccgaacaccagggactcccatctcctccatcgccactggcgtctgctcggagccagagggtcccctcccgccgtcccctcccgccctcctggccctattgcatgagtccagcatgaagccccgcggagcatgaggagctgcactgtggccgacgcgagcctgaaaccctctctgtttctcgcaacagaaagaagataacacccctggcccaccctcccccctcccatcagaggcaggtagggcagcccagtggcaggaagtcccgcccccatcagaggcaggtagggcagcccagtggcaggaagtcccgcccccatcagaggcaggtagggcagcccagtggcaggaagtcccgcccccatcagaggcaggtagggcagcccagtggcaggaagtcccgcccccatcagaggcaggtagggcagcccagtggcaggaagtccctcccccaccatcagaggcaggtagggcagcccagtggcaggaagtgaggacttggccccgtcggctggtgtggggcagtcttcatgtaccaggccccagtccaggggagacttgggagcttgtggcctctcctgggtgggtcctgctcagccacaccccgtcttgagctgcccttgtccagctgggcttttgtagacttactgcagggtctttgtttccaagtgagttcccacgtagctgcaggcctcagcgcacacccaccgtggtggcccctgccagcccagcagtggccgtgactctgtggataccagactggtcagaagcccccgtccctgagggcaaaggagcctccctcccttcttattgtcatgagtgacctgtggcctcattggagatcagctcagctgaattctgcatcctacacacacacatgcacacacgcaaacgtgcacactcttgcacacatgaacacatgcacacgcgtgcacacagaaacttgtgcaatgcacatgagggcacacacatgcacatcgagtgcacacacacgtgcacacacagaccctcgcagctttgtctcccctcttctggtttgtgcgttggttcctgtgctgctctgggccttctctccttgtcctggtgcatggagccgcagctctcacgccttttctgcttctgttgtccccgccgcagacatttaactccgtccccatcagacccggtggggccgacggcttcagtggcacattacgtaggagtaaagctccggggtgggcacgggtagggggaggggcatcctctggagtgggctccaggccctgcagtgggagaccctccgtgggctgtggggccaataggccttgggcagggaagagggtgagcaggtggggctggctggagggggcggtatggagccgggagcccacggagaggagccgggcgactcggccctggtgggagcgtccttactttactcctcgctaatgtgccaggccccttggggacagagcgggcaggagcagaacctcacggtgccagaagacgggctgagaacggggcgcaccccgtccatctgtcctggcacccactgccccctggtcggctctgggctgagcctgcagcctagacccaggggcactgtggcctggtccaggaggagagggcaggggccctgctgcacccacccgaactcatgctttggggtctctgttcccggtagagtggaccagatcgtggggcggggcccagcgatcacggacaaggaccgcaccaagggcccggccgaggcggagctgcccgaggaccccagcatgatgggacggctcgggaaggtggagaagcaggtgcgagaggctgggcgggaggggtgcggggctggagggctgtggtgcctgccgtcaacctgtggcagtgtgggcttcaggggctgggtgccacggagggctcctcaagtctagggtttacatggccctgtcaccactgacagctgctctgtgcagacccctcacaccccaccgtgagcctcccacccccggcctgggtgccttccctcctgacagtacccaagggccaaagtccccaggagtcctgggtgggggctgctgagaggtggatccctcaggggttccttgtggaacgtgccggaagttgtacctgcctggccttcctcctctctgtcctccttgcccgacaccctggccgctgtcttctgggggtgcattctcaggaaccaccgcagaggacccttgttttggggcctgcttctgagagccgggcctgagcagtgagtaaggaactgccaggtcctgccctgtggggctttcctgaagggggttccacggtgggcagcaggagggcctggctctgaacacacgccccaaccgtggagctggaggctttgcccctaggggtctgggaaggaggaagagctgctcctgggcctcctcttcccgctcctccagcttccagggagcagggatcccccctccctgtacctctccagggagcaacccaggtccccccacctcctgggaccagcccaagtcgaccgacttcctgggagtggtccaggtccccccatctcctaggaccagcctgggtcccccccatttcctgggactagcctgggtcccccatttcctgggactagcctgggtctctcctgtttcctggaaccagcctgggcccccccatttcctgggagcagcccgggtccccacatctcctgggactagcctgggtcccccgtttcctgggactagcctgggtctctcctgtttcctggaaccagcctgggcccccccatttcctgggagcagcctgggtccccacatctcctgggacgggccctcgcaccccagcccagcagccccttttgcaggtcttgtccatggagaagaagctggacttcctggtgaatatctacatgcagcggatgggcatccccccgacagagaccgaggcctactttggggccaaagagccggagccggcgccgccgtaccacagcccggaagacagccgggagcatgtcgacaggcacggctgcattgtcaagatcgtgcgctccagcagctccacgggccagaagaacttctcggcgcccccggccgcgccccctgtccagtgtccgccctccacctcctggcagccacagagccacccgcgccagggccacggcacctcccccgtgggggaccacggctccctggtgcgcatcccgccgccgcctgcccacgagcggtcgctgtccgcctacggcgggggcaaccgcgccagcatggagttcctgcggcaggaggacaccccgggctgcaggccccccgaggggaacctgcgggacagcgacacgtccatctccatcccgtccgtggaccacgaggagctggagcgttccttcagcggcttcagcatctcccagtccaaggagaacctggatgctctcaacagctgctacgcggccgtggcgccttgtgccaaagtcaggccctacattgcggagggagagtcagacaccgactccgacctctgtaccccgtgcgggcccccgccacgctcggccaccggcgagggtccctttggtgacgtgggctgggccgggcccaggaagtgaggcggcgctgggccagtggacccgcccgcggccctcctcagcacggtgcctccgaggttttgaggcgggaaccctctggggcccttttcttacagtaactgagtgtggcgggaagggtgggccctggaggggcccatgtgggctgaaggatgggggctcctggcagtgaccttttacaaaagttattttccaacaggggctggagggctgggcagggccctgtggctccaggagcagcgtgcaggagcaaggctgccctgtccactctgctcagggccgcggccgacatcagcccggtgtgaggaggggcgggagtgatgacggggtgttgccagcgtggcaacaggcggggggttgtctcagccgagcccaggggaggcacaaagggcaggcctgttccctgaggacctgcgcaaagggcgggcctgtttggtgaggacctgcggccttgggtcccggtggggtttccgggcagctacaggcgggtgtggccggccgctgtgcgtggcctctgccttcacacctgacctgcccggcgggctttcctgttccccacctcaggggcgcccaaatacagagctattggttggcgtcttctccctgtaccttctgggatctgagggctctttccatggaagccagccccgaggtggagaccttcgcctgcagccgaggagcgggtggggcctgggaaccaaactggagccagagtggacgtccagccctctggtcttggcctccagagggagggcctggctcacggtggggccagggagccggctccaaagggtcttcaaaaagggggtccttgggggctccagctgcctcgccctggcctttctgtgggtgcgtgagagccagcagcaccccagccttggagaccgggggggcaggaccccaagtcctcccctctctcctgactgccctggccgggtgccggcactgcgagacccacctggtgagcaggcctcacagttcttagccagggccccacctcgcctgtgtcccaccagtgccccgacagacctggggcagggctgggccatgatgcagcgggccaggatagcctccaccgtcagcacagggccgccctccccgcctttccggaggaaaccactcccacctcagcccagctgtgcgccctccctagctctcctgccccctggagctgatggccccttctccactgaccgattccttagcggggcctcttggggtctcgggcctcgggtgcaccgtcccatgcccgtcctgttgtgggcaccgtggcccttggggcaggcggctctaatgcgggagcgagtccctagctccagacttaagaaccagaccccgggagcatctggcatttggcgtgacggcgtcgcaggcgggcctgggctccctggagagtggcctccctgggagtgagcagggctggggtcgtgggcgcaaatactcctgcagagcaagtgcaggggagtcctgggcccgtttctcctccacctgcgttttcagtgcacttggcttggctgggaggtcctgaggccctgaggccagcaggggaaccagtcctgagggagaggactttgaaagcagcatttgagggtcgtacgcccctggctggtgggggtcctggcgctcagggtgttcggggagccatgtctggcgtccattgtggggagctgctgccctggcctctctgcctacccccagcccggccagggcactcccaggccctgtcgccattgaggtgcctccgctgggctgtctcctcacccctccctgtgctggagcctgtcccaaaaaggtgccaactgggaggcctcggaagccactgtccaggctcccactgcctgtctgctctgttcccaaaggcagcgtgtgtggcctcgggccctgcggtggcatgaagcatcccttctggtgtgggcatcgctacgtgttttgggggcagcgtttcacggcggtgcccttgctgtctcccttgggctggctcgagcctggggtccatgtccctttgccgtcccgtcatggggcagggaatccatagcggggcccacaggcaggggtatgagtgcgtcccacccaacgcagcaccagccccggccaccgctccccgtgtccccagttccgtctcagctacctggactccaggaccctggagaagggagacctggcagtggagggaggctgtgctgtgtgtccccctgcaggtgtgaccccgcctgctctttcctcccccgccaggtgtggccccgcctgctctttcctcccccaccagtatggccccacctgctctttcctccccccccaaggtgtggccccacctgttctttcctcccctgccgaggtgtgaccccacctgctctttcctccctcccagtatggccccacctgctctttcctcccccgaggtgaggccccgcctgctctttcctcccatggggccgctgaggcatgagcacctgggcacaggttggggctctgcaggatgaggaagacaggccaatcccttccctcccagaagctggccgcccagcaggagggactgaggccagactcatgtccagcaaggaacgtgtggtgtgtcccctgggaagtctctgggccctgggaagagggaaggtgcacgtcctgggatggttgcggggccctgttttgggagacaaaggggtagagggtctgtcttgggcccccccagactctagcctgagcagtgcagccacctactgccccacctcagagaagtgcagcgggaaggaggctggaggtggtgcggcgctgcctcgggtgtctgcgtgaatgagcgtggccaaggaccagtgccacctcatggcaaagagctcccgcagtgtttgttagagtgcacatccctacgtgcccactggcacacacacgtgctcacatacatgtccgcatacaggcgtacacatgcacgcttgcacacatgcacacagaccacatagcacacatgtgcactgaccacacctgtatagaccatgcacagtacacatacgtgcatacacatgcctgcatacaggcatacacatgcacgcttacatgtacacgtgcacagatcacacacatgcacacacgtgtagctcacacacagtatacacatacacaagtgcacagaccacacacagcactaacacatgcacacacaaagtgcataggccacacagcacatgcacacaggtgcacagaccacacagcacacacaagtgcacagagcacactgcacacatgcacacacacacgcgtgcatgcacactcctcgcacttccagccttggagcccttctgtctctggtctttctctttgaccctgctgagtgtaagctgcctggggaggggctacaaggagtaattgtggctttaggggtcgtggtgatgctggaatgtcaagcgccgtcgtggggtatccgactgtccgggctcctggtccgcagtggcagagcgccaggcagagcccaatcagggtctcgtgctgcccttccctcccacagcctggcagccatccagaggaggggctctaccagatgccaaggtgccccggtgtctgtatgggtgtccggttgggtcctgtgtttggtctgccctggaggtgctgggccctcctgggatgggtggctcagcctcgaatcccaggccccagcccaggcaggtgctgctgcctgttgtggtttcctggcccagcttctccttctccctctgcataaaatcacagtccgtgagtcttccagctgccaccacggctgggacacgctgggggagggctcctcccatgcctcctgcacacagccgtctgagcagggcaggtgcccaacaccccccaccggaggacacgctgcccctcagcgatgcccctaccttttggggggcctcgtctcaagcccccccttggaggctgaaatcaccccaggcactgtgagggcttctccagggggcaccctttgagctgtgggtctgatcaccccaagtcccgcccggaggagaggcacagccagggcgtgtggtttaatgtttgcccccttcggggctggaggtctcagtgtttctagattccagaccctgctgccagagagacctgctgccggagagaaggggaggaggactccagctgggctcggtcccccacagtcagggacccccataaaggacacccccttctctctagaaagagctgggctctcagctatttctagttgcttcccagaagccgaggagcagaaggagctgtgagagctttgcagaaacgcccttgtccccgccctcctgagctatgaatgccgtacagagcagaggctggggcattggcaagatcacaggttgatgctgcacagccccattgacacaaaccctcaaagcagacgtgagagggacggttcacaaagctcggacctgccgtggagggtgcccggcagacgtggcgtgagagggacggctcacgaggcttggacctgctgtggagggtgcccagcagacgtggtgtgagaggaacggctcacgagacttggacctggtggagggtgcccagcagacgtggtgtgagagggacggctcacagggcttggacctgccatggagggtgcccggcagacgtggtgtgagagggatggttcacagggcttggacctgccatggagggtgcccggcagatgtggtgggagagagatggctcatgaggcttggacctgccgtggagggtgcccagcagacgtggtatgagagggatggctcacgaggcttggacctggtggagggtgcccggcagacgtgtgagagggacggttcacaaggcttggacctgccatggagggtgcccagcagacgtggtgtgagagggacagctcacgaggcttggacctgctgtggagggtgcccagcagggggctgagctctgaggggtgggtgctcagtgcacgggtgcccccagtgtcctctgatcctgtccggtgcctcccccaacccccacacccatgcagaactcccaggtcacatgcacgtatgtccagggcatgggggtggcgtgaagaggcctggtcagggcctttaggggctgcaggacggaatggccgcctggggagcctgtgtggctgtgccgggcagccatcctgcattcccacccagcgcgcagtctccacctcggccccagcaaagcgctaagcagccggagagacagccagggcggcttcctgaaggatgtgggatggtggactccggggtcgagggaatacgcaggttcctgtccctccgggagacctagagaagctgcacacccaggagctttccatgacccgggagcatgagtgaatgggggttccagtttgctgaactttgccgtcttgtaagggtgggggctgacggccgaccctgggaggaggtgacatcgccgggggaggttgtgggcaacggtggaggaggagagacgggaggggaccatttgggatggaggggcctcttcagagttttaaaaggcgtttgtggggtggagttgagtgtgctctgggcttggacacttgccgtggtgcccctggctggccgaggagactggctctggccaggggccccgtcctgagaggtcctcagcgtctgactctcggccaggcgccagcaaggaggggccggtccccggggctaccaggcaggcacgtgcacatcgccatcgccacacgccaactccgcctgggttttacaaagtcgttgccttaatgcatgtggacaggaactccctgaggtcgccccatgccccctggctgtgccaggtacggacgccctggaccctgcgaacaggtggggcgggcgaggggcccaagggacgggctccagagacacgcgcagggcaggaggggtctcacggaggggtctcgcactgaggcgcccagagctggtggtcccgctggacgccatccctctgcccgggatccacacggcccacgtgtgcccgccatgcccgcgccccacgccattgcagtctgccatcctctggccgtgacggtggctgcagcttccccatttgcgccgttgcctctggctgtctgcacttttgttcatgctccaaagaacatttcataatgccttcagtaccgacgtacacttctgaccattttgtatgtgtccttgtgccgtagtgaccaggcctttttttggtggatgtgttaccccgcacacttcaatctcaactttgtgcaccgtccattttctagggatagacgcccagggaatgaactctagttttctaacagattagctgagatattaacttactcacacggacaggttgatgccagagccgtaagaatgcgccagtgcgggtttgcgggggacttcgggtgtggggtcctgcggccgcgatggccgtggaaggttctggggatccctgctgccacggggacgagttcggacgccaggtggacctgtgcactcagtaaaacgcagtgattcaacctgga

SEQ ID NO: 3045 - RNA, 64444167 nt, Homo sapiens (residues 1-2,148,139 of 64,444,167)
  source 1..64444167: mol_type = mRNA
nnnnnnnnnnnnnnnnnnnnnnnnnnnnnnnnnnnnnnnnnnnnnnnnnnnnnnnnnnnnnnnnnnnnnnnnnnnnnnnnnnnnnnnnnnnnnnnnnnnnnnnnnnnnnnnnnnnnnnnnnnnnnnnnnnnnnnnnnnnnnnnnnnnnnnnnnnnnnnnnnnnnnnnnnnnnnnnnnnnnnnnnnnnnnnnnnnnnnnnnnnnnnnnnnnnnnnnnnnnnnnnnnnnnnnnnnnnnnnnnnnnnnnnnnnnnnnnnnnnnnnnnnnnnnnnnnnnnnnnnnnnnnnnnnnnnnnnnnnnnnnnnnnnnnnnnnnnnnnnnnnnnnnnnnnnnnnnnnnnnnnnnnnnnnnnnnnnnnnnnnnnnnnnnnnnnnnnnnnnnnnnnnnnnnnnnnnnnnnnnnnnnnnnnnnnnnnnnnnnnnnnnnnnnnnnnnnnnnnnnnnnnnnnnnnnnnnnnnnnnnnnnnnnnnnnnnnnnnnnnnnnnnnnnnnnnnnnnnnnnnnnnnnnnnnnnnnnnnnnnnnnnnnnnnnnnnnnnnnnnnnnnnnnnnnnnnnnnnnnnnnnnnnnnnnnnnnnnnnnnnnnnnnnnnnnnnnnnnnnnnnnnnnnnnnnnnnnnnnnnnnnnnnnnnnnnnnnnnnnnnnnnnnnnnnnnnnnnnnnnnnnnnnnnnnnnnnnnnnnnnnnnnnnnnnnnnnnnnnnnnnnnnnnnnnnnnnnnnnnnnnnnnnnnnnnnnnnnnnnnnnnnnnnnnnnnnnnnnnnnnnnnnnnnnnnnnnnnnnnnnnnnnnnnnnnnnnnnnnnnnnnnnnnnnnnnnnnnnnnnnnnnnnnnnnnnnnnnnnnnnnnnnnnnnnnnnnnnnnnnnnnnnnnnnnnnnnnnnnnnnnnnnnnnnnnnnnnnnnnnnnnnnnnnnnnnnnnnnnnnnnnnnnnnnnnnnnnnnnnnnnnnnnnnnnnnnnnnnnnnnnnnnnnnnnnnnnnnnnnnnnnnnnnnnnnnnnnnnnnnnnnnnnnnnnnnnnnnnnnnnnnnnnnnnnnnnnnnnnnnnnnnnnnnnnnnnnnnnnnnnnnnnnnnnnnnnnnnnnnnnnnnnnnnnnnnnnnnnnnnnnnnnnnnnnnnnnnnnnnnnnnnnnnnnnnnnnnnnnnnnnnnnnnnnnnnnnnnnnnnnnnnnnnnnnnnnnnnnnnnnnnnnnnnnnnnnnnnnnnnnnnnnnnnnnnnnnnnnnnnnnnnnnnnnnnnnnnnnnnnnnnnnnnnnnnnnnnnnnnnnnnnnnnnnnnnnnnnnnnnnnnnnnnnnnnnnnnnnnnnnnnnnnnnnnnnnnnnnnnnnnnnnnnnnnnnnnnnnnnnnnnnnnnnnnnnnnnnnnnnnnnnnnnnnnnnnnnnnnnnnnnnnnnnnnnnnnnnnnnnnnnnnnnnnnnnnnnnnnnnnnnnnnnnnnnnnnnnnnnnnnnnnnnnnnnnnnnnnnnnnnnnnnnnnnnnnnnnnnnnnnnnnnnnnnnnnnnnnnnnnnnnnnnnnnnnnnnnnnnnnnnnnnnnnnnnnnnnnnnnnnnnnnnnnnnnnnnnnnnnnnnnnnnnnnnnnnnnnnnnnnnnnnnnnnnnnnnnnnnnnnnnnnnnnnnnnnnnnnnnnnnnnnnnnnnnnnnnnnnnnnnnnnnnnnnnnnnnnnnnnnnnnnnnnnnnnnnnnnnnnnnnnnnnnnnnnnnnnnnnnnnnnnnnnnnnnnnnnnnnnnnnnnnnnnnnnnnnnnnnnnnnnnnnnnnnnnnnnnnnnnnnnnnnnnnnnnnnnnnnnnnnnnnnnnnnnnnnnnnnnnnnnnnnnnnnnnnnnnnnnnnnnnnnnnnnnnnnnnnnnnnnnnnnnnnnnnnnnnnnnnnnnnnnnnnnnnnnnnnnnnnnnnnnnnnnnnnnnnnnnnnnnnnnnnnnnnnnnnnnnnnnnnnnnnnnnnnnnnnnnnnnnnnnnnnnnnnnnnnnnnnnnnnnnnnnnnnnnnnnnnnnnnnnnnnnnnnnnnnnnnnnnnnnnnnnnnnnnnnnnnnnnnnnnnnnnnnnnnnnnnnnnnnnnnnnnnnnnnnnnnnnnnnnnnnnnnnnnnnnnnnnnnnnnnnnnnnnnnnnnnnnnnnnnnnnnnnnnnnnnnnnnnnnnnnnnnnnnnnnnnnnnnnnnnnnnnnnnnnnnnnnnnnnnnnnnnnnnnnnnnnnnnnnnnnnnnnnnnnnnnnnnnnnnnnnnnnnnnnnnnnnnnnnnnnnnnnnnnnnnnnnnnnnnnnnnnnnnnnnnnnnnnnnnnnnnnnnnnnnnnnnnnnnnnnnnnnnnnnnnnnnnnnnnnnnnnnnnnnnnnnnnnnnnnnnnnnnnnnnnnnnnnnnnnnnnnnnnnnnnnnnnnnnnnnnnnnnnnnnnnnnnnnnnnnnnnnnnnnnnnnnnnnnnnnnnnnnnnnnnnnnnnnnnnnnnnnnnnnnnnnnnnnnnnnnnnnnnnnnnnnnnnnnnnnnnnnnnnnnnnnnnnnnnnnnnnnnnnnnnnnnnnnnnnnnnnnnnnnnnnnnnnnnnnnnnnnnnnnnnnnnnnnnnnnnnnnnnnnnnnnnnnnnnnnnnnnnnnnnnnnnnnnnnnnnnnnnnnnnnnnnnnnnnnnnnnnnnnnnnnnnnnnnnnnnnnnnnnnnnnnnnnnnnnnnnnnnnnnnnnnnnnnnnnnnnnnnnnnnnnnnnnnnnnnnnnnnnnnnnnnnnnnnnnnnnnnnnnnnnnnnnnnnnnnnnnnnnnnnnnnnnnnnnnnnnnnnnnnnnnnnnnnnnnnnnnnnnnnnnnnnnnnnnnnnnnnnnnnnnnnnnnnnnnnnnnnnnnnnnnnnnnnnnnnnnnnnnnnnnnnnnnnnnnnnnnnnnnnnnnnnnnnnnnnnnnnnnnnnnnnnnnnnnnnnnnnnnnnnnnnnnnnnnnnnnnnnnnnnnnnnnnnnnnnnnnnnnnnnnnnnnnnnnnnnnnnnnnnnnnnnnnnnnnnnnnnnnnnnnnnnnnnnnnnnnnnnnnnnnnnnnnnnnnnnnnnnnnnnnnnnnnnnnnnnnnnnnnnnnnnnnnnnnnnnnnnnnnnnnnnnnnnnnnnnnnnnnnnnnnnnnnnnnnnnnnnnnnnnnnnnnnnnnnnnnnnnnnnnnnnnnnnnnnnnnnnnnnnnnnnnnnnnnnnnnnnnnnnnnnnnnnnnnnnnnnnnnnnnnnnnnnnnnnnnnnnnnnnnnnnnnnnnnnnnnnnnnnnnnnnnnnnnnnnnnnnnnnnnnnnnnnnnnnnnnnnnnnnnnnnnnnnnnnnnnnnnnnnnnnnnnnnnnnnnnnnnnnnnnnnnnnnnnnnnnnnnnnnnnnnnnnnnnnnnnnnnnnnnnnnnnnnnnnnnnnnnnnnnnnnnnnnnnnnnnnnnnnnnnnnnnnnnnnnnnnnnnnnnnnnnnnnnnnnnnnnnnnnnnnnnnnnnnnnnnnnnnnnnnnnnnnnnnnnnnnnnnnnnnnnnnnnnnnnnnnnnnnnnnnnnnnnnnnnnnnnnnnnnnnnnnnnnnnnnnnnnnnnnnnnnnnnnnnnnnnnnnnnnnnnnnnnnnnnnnnnnnnnnnnnnnnnnnnnnnnnnnnnnnnnnnnnnnnnnnnnnnnnnnnnnnnnnnnnnnnnnnnnnnnnnnnnnnnnnnnnnnnnnnnnnnnnnnnnnnnnnnnnnnnnnnnnnnnnnnnnnnnnnnnnnnnnnnnnnnnnnnnnnnnnnnnnnnnnnnnnnnnnnnnnnnnnnnnnnnnnnnnnnnnnnnnnnnnnnnnnnnnnnnnnnnnnnnnnnnnnnnnnnnnnnnnnnnnnnnnnnnnnnnnnnnnnnnnnnnnnnnnnnnnnnnnnnnnnnnnnnnnnnnnnnnnnnnnnnnnnnnnnnnnnnnnnnnnnnnnnnnnnnnnnnnnnnnnnnnnnnnnnnnnnnnnnnnnnnnnnnnnnnnnnnnnnnnnnnnnnnnnnnnnnnnnnnnnnnnnnnnnnnnnnnnnnnnnnnnnnnnnnnnnnnnnnnnnnnnnnnnnnnnnnnnnnnnnnnnnnnnnnnnnnnnnnnnnnnnnnnnnnnnnnnnnnnnnnnnnnnnnnnnnnnnnnnnnnnnnnnnnnnnnnnnnnnnnnnnnnnnnnnnnnnnnnnnnnnnnnnnnnnnnnnnnnnnnnnnnnnnnnnnnnnnnnnnnnnnnnnnnnnnnnnnnnnnnnnnnnnnnnnnnnnnnnnnnnnnnnnnnnnnnnnnnnnnnnnnnnnnnnnnnnnnnnnnnnnnnnnnnnnnnnnnnnnnnnnnnnnnnnnnnnnnnnnnnnnnnnnnnnnnnnnnnnnnnnnnnnnnnnnnnnnnnnnnnnnnnnnnnnnnnnnnnnnnnnnnnnnnnnnnnnnnnnnnnnnnnnnnnnnnnnnnnnnnnnnnnnnnnnnnnnnnnnnnnnnnnnnnnnnnnnnnnnnnnnnnnnnnnnnnnnnnnnnnnnnnnnnnnnnnnnnnnnnnnnnnnnnnnnnnnnnnnnnnnnnnnnnnnnnnnnnnnnnnnnnnnnnnnnnnnnnnnnnnnnnnnnnnnnnnnnnnnnnnnnnnnnnnnnnnnnnnnnnnnnnnnnnnnnnnnnnnnnnnnnnnnnnnnnnnnnnnnnnnnnnnnnnnnnnnnnnnnnnnnnnnnnnnnnnnnnnnnnnnnnnnnnnnnnnnnnnnnnnnnnnnnnnnnnnnnnnnnnnnnnnnnnnnnnnnnnnnnnnnnnnnnnnnnnnnnnnnnnnnnnnnnnnnnnnnnnnnnnnnnnnnnnnnnnnnnnnnnnnnnnnnnnnnnnnnnnnnnnnnnnnnnnnnnnnnnnnnnnnnnnnnnnnnnnnnnnnnnnnnnnnnnnnnnnnnnnnnnnnnnnnnnnnnnnnnnnnnnnnnnnnnnnnnnnnnnnnnnnnnnnnnnnnnnnnnnnnnnnnnnnnnnnnnnnnnnnnnnnnnnnnnnnnnnnnnnnnnnnnnnnnnnnnnnnnnnnnnnnnnnnnnnnnnnnnnnnnnnnnnnnnnnnnnnnnnnnnnnnnnnnnnnnnnnnnnnnnnnnnnnnnnnnnnnnnnnnnnnnnnnnnnnnnnnnnnnnnnnnnnnnnnnnnnnnnnnnnnnnnnnnnnnnnnnnnnnnnnnnnnnnnnnnnnnnnnnnnnnnnnnnnnnnnnnnnnnnnnnnnnnnnnnnnnnnnnnnnnnnnnnnnnnnnnnnnnnnnnnnnnnnnnnnnnnnnnnnnnnnnnnnnnnnnnnnnnnnnnnnnnnnnnnnnnnnnnnnnnnnnnnnnnnnnnnnnnnnnnnnnnnnnnnnnnnnnnnnnnnnnnnnnnnnnnnnnnnnnnnnnnnnnnnnnnnnnnnnnnnnnnnnnnnnnnnnnnnnnnnnnnnnnnnnnnnnnnnnnnnnnnnnnnnnnnnnnnnnnnnnnnnnnnnnnnnnnnnnnnnnnnnnnnnnnnnnnnnnnnnnnnnnnnnnnnnnnnnnnnnnnnnnnnnnnnnnnnnnnnnnnnnnnnnnnnnnnnnnnnnnnnnnnnnnnnnnnnnnnnnnnnnnnnnnnnnnnnnnnnnnnnnnnnnnnnnnnnnnnnnnnnnnnnnnnnnnnnnnnnnnnnnnnnnnnnnnnnnnnnnnnnnnnnnnnnnnnnnnnnnnnnnnnnnnnnnnnnnnnnnnnnnnnnnnnnnnnnnnnnnnnnnnnnnnnnnnnnnnnnnnnnnnnnnnnnnnnnnnnnnnnnnnnnnnnnnnnnnnnnnnnnnnnnnnnnnnnnnnnnnnnnnnnnnnnnnnnnnnnnnnnnnnnnnnnnnnnnnnnnnnnnnnnnnnnnnnnnnnnnnnnnnnnnnnnnnnnnnnnnnnnnnnnnnnnnnnnnnnnnnnnnnnnnnnnnnnnnnnnnnnnnnnnnnnnnnnnnnnnnnnnnnnnnnnnnnnnnnnnnnnnnnnnnnnnnnnnnnnnnnnnnnnnnnnnnnnnnnnnnnnnnnnnnnnnnnnnnnnnnnnnnnnnnnnnnnnnnnnnnnnnnnnnnnnnnnnnnnnnnnnnnnnnnnnnnnnnnnnnnnnnnnnnnnnnnnnnnnnnnnnnnnnnnnnnnnnnnnnnnnnnnnnnnnnnnnnnnnnnnnnnnnnnnnnnnnnnnnnnnnnnnnnnnnnnnnnnnnnnnnnnnnnnnnnnnnnnnnnnnnnnnnnnnnnnnnnnnnnnnnnnnnnnnnnnnnnnnnnnnnnnnnnnnnnnnnnnnnnnnnnnnnnnnnnnnnnnnnnnnnnnnnnnnnnnnnnnnnnnnnnnnnnnnnnnnnnnnnnnnnnnnnnnnnnnnnnnnnnnnnnnnnnnnnnnnnnnnnnnnnnnnnnnnnnnnnnnnnnnnnnnnnnnnnnnnnnnnnnnnnnnnnnnnnnnnnnnnnnnnnnnnnnnnnnnnnnnnnnnnnnnnnnnnnnnnnnnnnnnnnnnnnnnnnnnnnnnnnnnnnnnnnnnnnnnnnnnnnnnnnnnnnnnnnnnnnnnnnnnnnnnnnnnnnnnnnnnnnnnnnnnnnnnnnnnnnnnnnnnnnnnnnnnnnnnnnnnnnnnnnnnnnnnnnnnnnnnnnnnnnnnnnnnnnnnnnnnnnnnnnnnnnnnnnnnnnnnnnnnnnnnnnnnnnnnnnnnnnnnnnnnnnnnnnnnnnnnnnnnnnnnnnnnnnnnnnnnnnnnnnnnnnnnnnnnnnnnnnnnnnnnnnnnnnnnnnnnnnnnnnnnnnnnnnnnnnnnnnnnnnnnnnnnnnnnnnnnnnnnnnnnnnnnnnnnnnnnnnnnnnnnnnnnnnnnnnnnnnnnnnnnnnnnnnnnnnnnnnnnnnnnnnnnnnnnnnnnnnnnnnnnnnnnnnnnnnnnnnnnnnnnnnnnnnnnnnnnnnnnnnnnnnnnnnnnnnnnnnnnnnnnnnnnnnnnnnnnnnnnnnnnnnnnnnnnnnnnnnnnnnnnnnnnnnnnnnnnnnnnnnnnnnnnnnnnnnnnnnnnnnnnnnnnnnnnnnnnnnnnnnnnnnnnnnnnnnnnnnnnnnnnnnnnnnnnnnnnnnnnnnnnnnnnnnnnnnnnnnnnnnnnnnnnnnnnnnnnnnnnnnnnnnnnnnnnnnnnnnnnnnnnnnnnnnnnnnnnnnnnnnnnnnnnnnnnnnnnnnnnnnnnnnnnnnnnnnnnnnnnnnnnnnnnnnnnnnnnnnnnnnnnnnnnnnnnnnnnnnnnnnnnnnnnnnnnnnnnnnnnnnnnnnnnnnnnnnnnnnnnnnnnnnnnnnnnnnnnnnnnnnnnnnnnnnnnnnnnnnnnnnnnnnnnnnnnnnnnnnnnnnnnnnnnnnnnnnnnnnnnnnnnnnnnnnnnnnnnnnnnnnnnnnnnnnnnnnnnnnnnnnnnnnnnnnnnnnnnnnnnnnnnnnnnnnnnnnnnnnnnnnnnnnnnnnnnnnnnnnnnnnnnnnnnnnnnnnnnnnnnnnnnnnnnnnnnnnnnnnnnnnnnnnnnnnnnnnnnnnnnnnnnnnnnnnnnnnnnnnnnnnnnnnnnnnnnnnnnnnnnnnnnnnnnnnnnnnnnnnnnnnnnnnnnnnnnnnnnnnnnnnnnnnnnnnnnnnnnnnnnnnnnnnnnnnnnnnnnnnnnnnnnnnnnnnnnnnnnnnnnnnnnnnnnnnnnnnnnnnnnnnnnnnnnnnnnnnnnnnnnnnnnnnnnnnnnnnnnnnnnnnnnnnnnnnnnnnnnnnnnnnnnnnnnnnnnnnnnnnnnnnnnnnnnnnnnnnnnnnnnnnnnnnnnnnnnnnnnnnnnnnnnnnnnnnnnnnnnnnnnnnnnnnnnnnnnnnnnnnnnnnnnnnnnnnnnnnnnnnnnnnnnnnnnnnnnnnnnnnnnnnnnnnnnnnnnnnnnnnnnnnnnnnnnnnnnnnnnnnnnnnnnnnnnnnnnnnnnnnnnnnnnnnnnnnnnnnnnnnnnnnnnnnnnnnnnnnnnnnnnnnnnnnnnnnnnnnnnnnnnnnnnnnnnnnnnnnnnnnnnnnnnnnnnnnnnnnnnnnnnnnnnnnnnnnnnnnnnnnnnnnnnnnnnnnnnnnnnnnnnnnnnnnnnnnnnnnnnnnnnnnnnnnnnnnnnnnnnnnnnnnnnnnnnnnnnnnnnnnnnnnnnnnnnnnnnnnnnnnnnnnnnnnnnnnnnnnnnnnnnnnnnnnnnnnnnnnnnnnnnnnnnnnnnnnnnnnnnnnnnnnnnnnnnnnnnnnnnnnnnnnnnnnnnnnnnnnnnnnnnnnnnnnnnnnnnnnnnnnnnnnnnnnnnnnnnnnnnnnnnnnnnnnnnnnnnnnnnnnnnnnnnnnnnnnnnnnnnnnnnnnnnnnnnnnnnnnnnnnnnnnnnnnnnnnnnnnnnnnnnnnnnnnnnnnnnnnnnnnnnnnnnnnnnnnnnnnnnnnnnnnnnnnnnnnnnnnnnnnnnnnnnnnnnnnnnnnnnnnnnnnnnnnnnnnnnnnnnnnnnnnnnnnnnnnnnnnnnnnnnnnnnnnnnnnnnnnnnnnnnnnnnnnnnnnnnnnnnnnnnnnnnnnnnnnnnnnnnnnnnnnnnnnnnnnnnnnnnnnnnnnnnnnnnnnnnnnnnnnnnnnnnnnnnnnnnnnnnnnnnnnnnnnnnnnnnnnnnnnnnnnnnnnnnnnnnnnnnnnnnnnnnnnnnnnnnnnnnnnnnnnnnnnnnnnnnnnnnnnnnnnnnnnnnnnnnnnnnnnnnnnnnnnnnnnnnnnnnnnnnnnnnnnnnnnnnnnnnnnnnnnnnnnnnnnnnnnnnnnnnnnnnnnnnnnnnnnnnnnnnnnnnnnnnnnnnnnnnnnnnnnnnnnnnnnnnnnnnnnnnnnnnnnnnnnnnnnnnnnnnnnnnnnnnnnnnnnnnnnnnnnnnnnnnnnnnnnnnnnnnnnnnnnnnnnnnnnnnnnnnnnnnnnnnnnnnnnnnnnnnnnnnnnnnnnnnnnnnnnnnnnnnnnnnnnnnnnnnnnnnnnnnnnnnnnnnnnnnnnnnnnnnnnnnnnnnnnnnnnnnnnnnnnnnnnnnnnnnnnnnnnnnnnnnnnnnnnnnnnnnnnnnnnnnnnnnnnnnnnnnnnnnnnnnnnnnnnnnnnnnnnnnnnnnnnnnnnnnnnnnnnnnnnnnnnnnnnnnnnnnnnnnnnnnnnnnnnnnnnnnnnnnnnnnnnnnnnnnnnnnnnnnnnnnnnnnnnnnnnnnnnnnnnnnnnnnnnnnnnnnnnnnnnnnnnnnnnnnnnnnnnnnnnnnnnnnnnnnnnnnnnnnnnnnnnnnnnnnnnnnnnnnnnnnnnnnnnnnnnnnnnnnnnnnnnnnnnnnnnnnnnnnnnnnnnnnnnnnnnnnnnnnnnnnnnnnnnnnnnnnnnnnnnnnnnnnnnnnnnnnnnnnnnnnnnnnnnnnnnnnnnnnnnnnnnnnnnnnnnnnnnnnnnnnnnnnnnnnnnnnnnnnnnnnnnnnnnnnnnnnnnnnnnnnnnnnnnnnnnnnnnnnnnnnnnnnnnnnnnnnnnnnnnnnnnnnnnnnnnnnnnnnnnnnnnnnnnnnnnnnnnnnnnnnnnnnnnnnnnnnnnnnnnnnnnnnnnnnnnnnnnnnnnnnnnnnnnnnnnnnnnnnnnnnnnnnnnnnnnnnnnnnnnnnnnnnnnnnnnnnnnnnnnnnnnnnnnnnnnnnnnnnnnnnnnnnnnnnnnnnnnnnnnnnnnnnnnnnnnnnnnnnnnnnnnnnnnnnnnnnnnnnnnnnnnnnnnnnnnnnnnnnnnnnnnnnnnnnnnnnnnnnnnnnnnnnnnnnnnnnnnnnnnnnnnnnnnnnnnnnnnnnnnnnnnnnnnnnnnnnnnnnnnnnnnnnnnnnnnnnnnnnnnnnnnnnnnnnnnnnnnnnnnnnnnnnnnnnnnnnnnnnnnnnnnnnnnnnnnnnnnnnnnnnnnnnnnnnnnnnnnnnnnnnnnnnnnnnnnnnnnnnnnnnnnnnnnnnnnnnnnnnnnnnnnnnnnnnnnnnnnnnnnnnnnnnnnnnnnnnnnnnnnnnnnnnnnnnnnnnnnnnnnnnnnnnnnnnnnnnnnnnnnnnnnnnnnnnnnnnnnnnnnnnnnnnnnnnnnnnnnnnnnnnnnnnnnnnnnnnnnnnnnnnnnnnnnnnnnnnnnnnnnnnnnnnnnnnnnnnnnnnnnnnnnnnnnnnnnnnnnnnnnnnnnnnnnnnnnnnnnnnnnnnnnnnnnnnnnnnnnnnnnnnnnnnnnnnnnnnnnnnnnnnnnnnnnnnnnnnnnnnnnnnnnnnnnnnnnnnnnnnnnnnnnnnnnnnnnnnnnnnnnnnnnnnnnnnnnnnnnnnnnnnnnnnnnnnnnnnnnnnnnnnnnnnnnnnnnnnnnnnnnnnnnnnnnnnnnnnnnnnnnnnnnnnnnnnnnnnnnnnnnnnnnnnnnnnnnnnnnnnnnnnnnnnnnnnnnnnnnnnnnnnnnnnnnnnnnnnnnnnnnnnnnnnnnnnnnnnnnnnnnnnnnnnnnnnnnnnnnnnnnnnnnnnnnnnnnnnnnnnnnnnnnnnnnnnnnnnnnnnnnnnnnnnnnnnnnnnnnnnnnnnnnnnnnnnnnnnnnnnnnnnnnnnnnnnnnnnnnnnnnnnnnnnnnnnnnnnnnnnnnnnnnnnnnnnnnnnnnnnnnnnnnnnnnnnnnnnnnnnnnnnnnnnnnnnnnnnnnnnnnnnnnnnnnnnnnnnnnnnnnnnnnnnnnnnnnnnnnnnnnnnnnnnnnnnnnnnnnnnnnnnnnnnnnnnnnnnnnnnnnnnnnnnnnnnnnnnnnnnnnnnnnnnnnnnnnnnnnnnnnnnnnnnnnnnnnnnnnnnnnnnnnnnnnnnnnnnnnnnnnnnnnnnnnnnnnnnnnnnnnnnnnnnnnnnnnnnnnnnnnnnnnnnnnnnnnnnnnnnnnnnnnnnnnnnnnnnnnnnnnnnnnnnnnnnnnnnnnnnnnnnnnnnnnnnnnnnnnnnnnnnnnnnnnnnnnnnnnnnnnnnnnnnnnnnnnnnnnnnnnnnnnnnnnnnnnnnnnnnnnnnnnnnnnnnnnnnnnnnnnnnnnnnnnnnnnnnnnnnnnnnnnnnnnnnnnnnnnnnnnnnnnnnnnnnnnnnnnnnnnnnnnnnnnnnnnnnnnnnnnnnnnnnnnnnnnnnnnnnnnnnnnnnnnnnnnnnnnnnnnnnnnnnnnnnnnnnnnnnnnnnnnnnnnnnnnnnnnnnnnnnnnnnnnnnnnnnnnnnnnnnnnnnnnnnnnnnnnnnnnnnnnnnnnnnnnnnnnnnnnnnnnnnnnnnnnnnnnnnnnnnnnnnnnnnnnnnnnnnnnnnnnnnnnnnnnnnnnnnnnnnnnnnnnnnnnnnnnnnnnnnnnnnnnnnnnnnnnnnnnnnnnnnnnnnnnnnnnnnnnnnnnnnnnnnnnnnnnnnnnnnnnnnnnnnnnnnnnnnnnnnnnnnnnnnnnnnnnnnnnnnnnnnnnnnnnnnnnnnnnnnnnnnnnnnnnnnnnnnnnnnnnnnnnnnnnnnnnnnnnnnnnnnnnnnnnnnnnnnnnnnnnnnnnnnnnnnnnnnnnnnnnnnnnnnnnnnnnnnnnnnnnnnnnnnnnnnnnnnnnnnnnnnnnnnnnnnnnnnnnnnnnnnnnnnnnnnnnnnnnnnnnnnnnnnnnnnnnnnnnnnnnnnnnnnnnnnnnnnnnnnnnnnnnnnnnnnnnnnnnnnnnnnnnnnnnnnnnnnnnnnnnnnnnnnnnnnnnnnnnnnnnnnnnnnnnnnnnnnnnnnnnnnnnnnnnnnnnnnnnnnnnnnnnnnnnnnnnnnnnnnnnnnnnnnnnnnnnnnnnnnnnnnnnnnnnnnnnnnnnnnnnnnnnnnnnnnnnnnnnnnnnnnnnnnnnnnnnnnnnnnnnnnnnnnnnnnnnnnnnnnnnnnnnnnnnnnnnnnnnnnnnnnnnnnnnnnnnnnnnnnnnnnnnnnnnnnnnnnnnnnnnnnnnnnnnnnnnnnnnnnnnnnnnnnnnnnnnnnnnnnnnnnnnnnnnnnnnnnnnnnnnnnnnnnnnnnnnnnnnnnnnnnnnnnnnnnnnnnnnnnnnnnnnnnnnnnnnnnnnnnnnnnnnnnnnnnnnnnnnnnnnnnnnnnnnnnnnnnnnnnnnnnnnnnnnnnnnnnnnnnnnnnnnnnnnnnnnnnnnnnnnnnnnnnnnnnnnnnnnnnnnnnnnnnnnnnnnnnnnnnnnnnnnnnnnnnnnnnnnnnnnnnnnnnnnnnnnnnnnnnnnnnnnnnnnnnnnnnnnnnnnnnnnnnnnnnnnnnnnnnnnnnnnnnnnnnnnnnnnnnnnnnnnnnnnnnnnnnnnnnnnnnnnnnnnnnnnnnnnnnnnnnnnnnnnnnnnnnnnnnnnnnnnnnnnnnnnnnnnnnnnnnnnnnnnnnnnnnnnnnnnnnnnnnnnnnnnnnnnnnnnnnnnnnnnnnnnnnnnnnnnnnnnnnnnnnnnnnnnnnnnnnnnnnnnnnnnnnnnnnnnnnnnnnnnnnnnnnnnnnnnnnnnnnnnnnnnnnnnnnnnnnnnnnnnnnnnnnnnnnnnnnnnnnnnnnnnnnnnnnnnnnnnnnnnnnnnnnnnnnnnnnnnnnnnnnnnnnnnnnnnnnnnnnnnnnnnnnnnnnnnnnnnnnnnnnnnnnnnnnnnnnnnnnnnnnnnnnnnnnnnnnnnnnnnnnnnnnnnnnnnnnnnnnnnnnnnnnnnnnnnnnnnnnnnnnnnnnnnnnnnnnnnnnnnnnnnnnnnnnnnnnnnnnnnnnnnnnnnnnnnnnnnnnnnnnnnnnnnnnnnnnnnnnnnnnnnnnnnnnnnnnnnnnnnnnnnnnnnnnnnnnnnnnnnnnnnnnnnnnnnnnnnnnnnnnnnnnnnnnnnnnnnnnnnnnnnnnnnnnnnnnnnnnnnnnnnnnnnnnnnnnnnnnnnnnnnnnnnnnnnnnnnnnnnnnnnnnnnnnnnnnnnnnnnnnnnnnnnnnnnnnnnnnnnnnnnnnnnnnnnnnnnnnnnnnnnnnnnnnnnnnnnnnnnnnnnnnnnnnnnnnnnnnnnnnnnnnnnnnnnnnnnnnnnnnnnnnnnnnnnnnnnnnnnnnnnnnnnnnnnnnnnnnnnnnnnnnnnnnnnnnnnnnnnnnnnnnnnnnnnnnnnnnnnnnnnnnnnnnnnnnnnnnnnnnnnnnnnnnnnnnnnnnnnnnnnnnnnnnnnnnnnnnnnnnnnnnnnnnnnnnnnnnnnnnnnnnnnnnnnnnnnnnnnnnnnnnnnnnnnnnnnnnnnnnnnnnnnnnnnnnnnnnnnnnnnnnnnnnnnnnnnnnnnnnnnnnnnnnnnnnnnnnnnnnnnnnnnnnnnnnnnnnnnnnnnnnnnnnnnnnnnnnnnnnnnnnnnnnnnnnnnnnnnnnnnnnnnnnnnnnnnnnnnnnnnnnnnnnnnnnnnnnnnnnnnnnnnnnnnnnnnnnnnnnnnnnnnnnnnnnnnnnnnnnnnnnnnnnnnnnnnnnnnnnnnnnnnnnnnnnnnnnnnnnnnnnnnnnnnnnnnnnnnnnnnnnnnnnnnnnnnnnnnnnnnnnnnnnnnnnnnnnnnnnnnnnnnnnnnnnnnnnnnnnnnnnnnnnnnnnnnnnnnnnnnnnnnnnnnnnnnnnnnnnnnnnnnnnnnnnnnnnnnnnnnnnnnnnnnnnnnnnnnnnnnnnnnnnnnnnnnnnnnnnnnnnnnnnnnnnnnnnnnnnnnnnnnnnnnnnnnnnnnnnnnnnnnnnnnnnnnnnnnnnnnnnnnnnnnnnnnnnnnnnnnnnnnnnnnnnnnnnnnnnnnnnnnnnnnnnnnnnnnnnnnnnnnnnnnnnnnnnnnnnnnnnnnnnnnnnnnnnnnnnnnnnnnnnnnnnnnnnnnnnnnnnnnnnnnnnnnnnnnnnnnnnnnnnnnnnnnnnnnnnnnnnnnnnnnnnnnnnnnnnnnnnnnnnnnnnnnnnnnnnnnnnnnnnnnnnnnnnnnnnnnnnnnnnnnnnnnnnnnnnnnnnnnnnnnnnnnnnnnnnnnnnnnnnnnnnnnnnnnnnnnnnnnnnnnnnnnnnnnnnnnnnnnnnnnnnnnnnnnnnnnnnnnnnnnnnnnnnnnnnnnnnnnnnnnnnnnnnnnnnnnnnnnnnnnnnnnnnnnnnnnnnnnnnnnnnnnnnnnnnnnnnnnnnnnnnnnnnnnnnnnnnnnnnnnnnnnnnnnnnnnnnnnnnnnnnnnnnnnnnnnnnnnnnnnnnnnnnnnnnnnnnnnnnnnnnnnnnnnnnnnnnnnnnnnnnnnnnnnnnnnnnnnnnnnnnnnnnnnnnnnnnnnnnnnnnnnnnnnnnnnnnnnnnnnnnnnnnnnnnnnnnnnnnnnnnnnnnnnnnnnnnnnnnnnnnnnnnnnnnnnnnnnnnnnnnnnnnnnnnnnnnnnnnnnnnnnnnnnnnnnnnnnnnnnnnnnnnnnnnnnnnnnnnnnnnnnnnnnnnnnnnnnnnnnnnnnnnnnnnnnnnnnnnnnnnnnnnnnnnnnnnnnnnnnnnnnnnnnnnnnnnnnnnnnnnnnnnnnnnnnnnnnnnnnnnnnnnnnnnnnnnnnnnnnnnnnnnnnnnnnnnnnnnnnnnnnnnnnnnnnnnnnnnnnnnnnnnnnnnnnnnnnnnnnnnnnnnnnnnnnnnnnnnnnnnnnnnnnnnnnnnnnnnnnnnnnnnnnnnnnnnnnnnnnnnnnnnnnnnnnnnnnnnnnnnnnnnnnnnnnnnnnnnnnnnnnnnnnnnnnnnnnnnnnnnnnnnnnnnnnnnnnnnnnnnnnnnnnnnnnnnnnnnnnnnnnnnnnnnnnnnnnnnnnnnnnnnnnnnnnnnnnnnnnnnnnnnnnnnnnnnnnnnnnnnnnnnnnnnnnnnnnnnnnnnnnnnnnnnnnnnnnnnnnnnnnnnnnnnnnnnnnnnnnnnnnnnnnnnnnnnnnnnnnnnnnnnnnnnnnnnnnnnnnnnnnnnnnnnnnnnnnnnnnnnnnnnnnnnnnnnnnnnnnnnnnnnnnnnnnnnnnnnnnnnnnnnnnnnnnnnnnnnnnnnnnnnnnnnnnnnnnnnnnnnnnnnnnnnnnnnnnnnnnnnnnnnnnnnnnnnnnnnnnnnnnnnnnnnnnnnnnnnnnnnnnnnnnnnnnnnnnnnnnnnnnnnnnnnnnnnnnnnnnnnnnnnnnnnnnnnnnnnnnnnnnnnnnnnnnnnnnnnnnnnnnnnnnnnnnnnnnnnnnnnnnnnnnnnnnnnnnnnnnnnnnnnnnnnnnnnnnnnnnnnnnnnnnnnnnnnnnnnnnnnnnnnnnnnnnnnnnnnnnnnnnnnnnnnnnnnnnnnnnnnnnnnnnnnnnnnnnnnnnnnnnnnnnnnnnnnnnnnnnnnnnnnnnnnnnnnnnnnnnnnnnnnnnnnnnnnnnnnnnnnnnnnnnnnnnnnnnnnnnnnnnnnnnnnnnnnnnnnnnnnnnnnnnnnnnnnnnnnnnnnnnnnnnnnnnnnnnnnnnnnnnnnnnnnnnnnnnnnnnnnnnnnnnnnnnnnnnnnnnnnnnnnnnnnnnnnnnnnnnnnnnnnnnnnnnnnnnnnnnnnnnnnnnnnnnnnnnnnnnnnnnnnnnnnnnnnnnnnnnnnnnnnnnnnnnnnnnnnnnnnnnnnnnnnnnnnnnnnnnnnnnnnnnnnnnnnnnnnnnnnnnnnnnnnnnnnnnnnnnnnnnnnnnnnnnnnnnnnnnnnnnnnnnnnnnnnnnnnnnnnnnnnnnnnnnnnnnnnnnnnnnnnnnnnnnnnnnnnnnnnnnnnnnnnnnnnnnnnnnnnnnnnnnnnnnnnnnnnnnnnnnnnnnnnnnnnnnnnnnnnnnnnnnnnnnnnnnnnnnnnnnnnnnnnnnnnnnnnnnnnnnnnnnnnnnnnnnnnnnnnnnnnnnnnnnnnnnnnnnnnnnnnnnnnnnnnnnnnnnnnnnnnnnnnnnnnnnnnnnnnnnnnnnnnnnnnnnnnnnnnnnnnnnnnnnnnnnnnnnnnnnnnnnnnnnnnnnnnnnnnnnnnnnnnnnnnnnnnnnnnnnnnnnnnnnnnnnnnnnnnnnnnnnnnnnnnnnnnnnnnnnnnnnnnnnnnnnnnnnnnnnnnnnnnnnnnnnnnnnnnnnnnnnnnnnnnnnnnnnnnnnnnnnnnnnnnnnnnnnnnnnnnnnnnnnnnnnnnnnnnnnnnnnnnnnnnnnnnnnnnnnnnnnnnnnnnnnnnnnnnnnnnnnnnnnnnnnnnnnnnnnnnnnnnnnnnnnnnnnnnnnnnnnnnnnnnnnnnnnnnnnnnnnnnnnnnnnnnnnnnnnnnnnnnnnnnnnnnnnnnnnnnnnnnnnnnnnnnnnnnnnnnnnnnnnnnnnnnnnnnnnnnnnnnnnnnnnnnnnnnnnnnnnnnnnnnnnnnnnnnnnnnnnnnnnnnnnnnnnnnnnnnnnnnnnnnnnnnnnnnnnnnnnnnnnnnnnnnnnnnnnnnnnnnnnnnnnnnnnnnnnnnnnnnnnnnnnnnnnnnnnnnnnnnnnnnnnnnnnnnnnnnnnnnnnnnnnnnnnnnnnnnnnnnnnnnnnnnnnnnnnnnnnnnnnnnnnnnnnnnnnnnnnnnnnnnnnnnnnnnnnnnnnnnnnnnnnnnnnnnnnnnnnnnnnnnnnnnnnnnnnnnnnnnnnnnnnnnnnnnnnnnnnnnnnnnnnnnnnnnnnnnnnnnnnnnnnnnnnnnnnnnnnnnnnnnnnnnnnnnnnnnnnnnnnnnnnnnnnnnnnnnnnnnnnnnnnnnnnnnnnnnnnnnnnnnnnnnnnnnnnnnnnnnnnnnnnnnnnnnnnnnnnnnnnnnnnnnnnnnnnnnnnnnnnnnnnnnnnnnnnnnnnnnnnnnnnnnnnnnnnnnnnnnnnnnnnnnnnnnnnnnnnnnnnnnnnnnnnnnnnnnnnnnnnnnnnnnnnnnnnnnnnnnnnnnnnnnnnnnnnnnnnnnnnnnnnnnnnnnnnnnnnnnnnnnnnnnnnnnnnnnnnnnnnnnnnnnnnnnnnnnnnnnnnnnnnnnnnnnnnnnnnnnnnnnnnnnnnnnnnnnnnnnnnnnnnnnnnnnnnnnnnnnnnnnnnnnnnnnnnnnnnnnnnnnnnnnnnnnnnnnnnnnnnnnnnnnnnnnnnnnnnnnnnnnnnnnnnnnnnnnnnnnnnnnnnnnnnnnnnnnnnnnnnnnnnnnnnnnnnnnnnnnnnnnnnnnnnnnnnnnnnnnnnnnnnnnnnnnnnnnnnnnnnnnnnnnnnnnnnnnnnnnnnnnnnnnnnnnnnnnnnnnnnnnnnnnnnnnnnnnnnnnnnnnnnnnnnnnnnnnnnnnnnnnnnnnnnnnnnnnnnnnnnnnnnnnnnnnnnnnnnnnnnnnnnnnnnnnnnnnnnnnnnnnnnnnnnnnnnnnnnnnnnnnnnnnnnnnnnnnnnnnnnnnnnnnnnnnnnnnnnnnnnnnnnnnnnnnnnnnnnnnnnnnnnnnnnnnnnnnnnnnnnnnnnnnnnnnnnnnnnnnnnnnnnnnnnnnnnnnnnnnnnnnnnnnnnnnnnnnnnnnnnnnnnnnnnnnnnnnnnnnnnnnnnnnnnnnnnnnnnnnnnnnnnnnnnnnnnnnnnnnnnnnnnnnnnnnnnnnnnnnnnnnnnnnnnnnnnnnnnnnnnnnnnnnnnnnnnnnnnnnnnnnnnnnnnnnnnnnnnnnnnnnnnnnnnnnnnnnnnnnnnnnnnnnnnnnnnnnnnnnnnnnnnnnnnnnnnnnnnnnnnnnnnnnnnnnnnnnnnnnnnnnnnnnnnnnnnnnnnnnnnnnnnnnnnnnnnnnnnnnnnnnnnnnnnnnnnnnnnnnnnnnnnnnnnnnnnnnnnnnnnnnnnnnnnnnnnnnnnnnnnnnnnnnnnnnnnnnnnnnnnnnnnnnnnnnnnnnnnnnnnnnnnnnnnnnnnnnnnnnnnnnnnnnnnnnnnnnnnnnnnnnnnnnnnnnnnnnnnnnnnnnnnnnnnnnnnnnnnnnnnnnnnnnnnnnnnnnnnnnnnnnnnnnnnnnnnnnnnnnnnnnnnnnnnnnnnnnnnnnnnnnnnnnnnnnnnnnnnnnnnnnnnnnnnnnnnnnnnnnnnnnnnnnnnnnnnnnnnnnnnnnnnnnnnnnnnnnnnnnnnnnnnnnnnnnnnnnnnnnnnnnnnnnnnnnnnnnnnnnnnnnnnnnnnnnnnnnnnnnnnnnnnnnnnnnnnnnnnnnnnnnnnnnnnnnnnnnnnnnnnnnnnnnnnnnnnnnnnnnnnnnnnnnnnnnnnnnnnnnnnnnnnnnnnnnnnnnnnnnnnnnnnnnnnnnnnnnnnnnnnnnnnnnnnnnnnnnnnnnnnnnnnnnnnnnnnnnnnnnnnnnnnnnnnnnnnnnnnnnnnnnnnnnnnnnnnnnnnnnnnnnnnnnnnnnnnnnnnnnnnnnnnnnnnnnnnnnnnnnnnnnnnnnnnnnnnnnnnnnnnnnnnnnnnnnnnnnnnnnnnnnnnnnnnnnnnnnnnnnnnnnnnnnnnnnnnnnnnnnnnnnnnnnnnnnnnnnnnnnnnnnnnnnnnnnnnnnnnnnnnnnnnnnnnnnnnnnnnnnnnnnnnnnnnnnnnnnnnnnnnnnnnnnnnnnnnnnnnnnnnnnnnnnnnnnnnnnnnnnnnnnnnnnnnnnnnnnnnnnnnnnnnnnnnnnnnnnnnnnnnnnnnnnnnnnnnnnnnnnnnnnnnnnnnnnnnnnnnnnnnnnnnnnnnnnnnnnnnnnnnnnnnnnnnnnnnnnnnnnnnnnnnnnnnnnnnnnnnnnnnnnnnnnnnnnnnnnnnnnnnnnnnnnnnnnnnnnnnnnnnnnnnnnnnnnnnnnnnnnnnnnnnnnnnnnnnnnnnnnnnnnnnnnnnnnnnnnnnnnnnnnnnnnnnnnnnnnnnnnnnnnnnnnnnnnnnnnnnnnnnnnnnnnnnnnnnnnnnnnnnnnnnnnnnnnnnnnnnnnnnnnnnnnnnnnnnnnnnnnnnnnnnnnnnnnnnnnnnnnnnnnnnnnnnnnnnnnnnnnnnnnnnnnnnnnnnnnnnnnnnnnnnnnnnnnnnnnnnnnnnnnnnnnnnnnnnnnnnnnnnnnnnnnnnnnnnnnnnnnnnnnnnnnnnnnnnnnnnnnnnnnnnnnnnnnnnnnnnnnnnnnnnnnnnnnnnnnnnnnnnnnnnnnnnnnnnnnnnnnnnnnnnnnnnnnnnnnnnnnnnnnnnnnnnnnnnnnnnnnnnnnnnnnnnnnnnnnnnnnnnnnnnnnnnnnnnnnnnnnnnnnnnnnnnnnnnnnnnnnnnnnnnnnnnnnnnnnnnnnnnnnnnnnnnnnnnnnnnnnnnnnnnnnnnnnnnnnnnnnnnnnnnnnnnnnnnnnnnnnnnnnnnnnnnnnnnnnnnnnnnnnnnnnnnnnnnnnnnnnnnnnnnnnnnnnnnnnnnnnnnnnnnnnnnnnnnnnnnnnnnnnnnnnnnnnnnnnnnnnnnnnnnnnnnnnnnnnnnnnnnnnnnnnnnnnnnnnnnnnnnnnnnnnnnnnnnnnnnnnnnnnnnnnnnnnnnnnnnnnnnnnnnnnnnnnnnnnnnnnnnnnnnnnnnnnnnnnnnnnnnnnnnnnnnnnnnnnnnnnnnnnnnnnnnnnnnnnnnnnnnnnnnnnnnnnnnnnnnnnnnnnnnnnnnnnnnnnnnnnnnnnnnnnnnnnnnnnnnnnnnnnnnnnnnnnnnnnnnnnnnnnnnnnnnnnnnnnnnnnnnnnnnnnnnnnnnnnnnnnnnnnnnnnnnnnnnnnnnnnnnnnnnnnnnnnnnnnnnnnnnnnnnnnnnnnnnnnnnnnnnnnnnnnnnnnnnnnnnnnnnnnnnnnnnnnnnnnnnnnnnnnnnnnnnnnnnnnnnnnnnnnnnnnnnnnnnnnnnnnnnnnnnnnnnnnnnnnnnnnnnnnnnnnnnnnnnnnnnnnnnnnnnnnnnnnnnnnnnnnnnnnnnnnnnnnnnnnnnnnnnnnnnnnnnnnnnnnnnnnnnnnnnnnnnnnnnnnnnnnnnnnnnnnnnnnnnnnnnnnnnnnnnnnnnnnnnnnnnnnnnnnnnnnnnnnnnnnnnnnnnnnnnnnnnnnnnnnnnnnnnnnnnnnnnnnnnnnnnnnnnnnnnnnnnnnnnnnnnnnnnnnnnnnnnnnnnnnnnnnnnnnnnnnnnnnnnnnnnnnnnnnnnnnnnnnnnnnnnnnnnnnnnnnnnnnnnnnnnnnnnnnnnnnnnnnnnnnnnnnnnnnnnnnnnnnnnnnnnnnnnnnnnnnnnnnnnnnnnnnnnnnnnnnnnnnnnnnnnnnnnnnnnnnnnnnnnnnnnnnnnnnnnnnnnnnnnnnnnnnnnnnnnnnnnnnnnnnnnnnnnnnnnnnnnnnnnnnnnnnnnnnnnnnnnnnnnnnnnnnnnnnnnnnnnnnnnnnnnnnnnnnnnnnnnnnnnnnnnnnnnnnnnnnnnnnnnnnnnnnnnnnnnnnnnnnnnnnnnnnnnnnnnnnnnnnnnnnnnnnnnnnnnnnnnnnnnnnnnnnnnnnnnnnnnnnnnnnnnnnnnnnnnnnnnnnnnnnnnnnnnnnnnnnnnnnnnnnnnnnnnnnnnnnnnnnnnnnnnnnnnnnnnnnnnnnnnnnnnnnnnnnnnnnnnnnnnnnnnnnnnnnnnnnnnnnnnnnnnnnnnnnnnnnnnnnnnnnnnnnnnnnnnnnnnnnnnnnnnnnnnnnnnnnnnnnnnnnnnnnnnnnnnnnnnnnnnnnnnnnnnnnnnnnnnnnnnnnnnnnnnnnnnnnnnnnnnnnnnnnnnnnnnnnnnnnnnnnnnnnnnnnnnnnnnnnnnnnnnnnnnnnnnnnnnnnnnnnnnnnnnnnnnnnnnnnnnnnnnnnnnnnnnnnnnnnnnnnnnnnnnnnnnnnnnnnnnnnnnnnnnnnnnnnnnnnnnnnnnnnnnnnnnnnnnnnnnnnnnnnnnnnnnnnnnnnnnnnnnnnnnnnnnnnnnnnnnnnnnnnnnnnnnnnnnnnnnnnnnnnnnnnnnnnnnnnnnnnnnnnnnnnnnnnnnnnnnnnnnnnnnnnnnnnnnnnnnnnnnnnnnnnnnnnnnnnnnnnnnnnnnnnnnnnnnnnnnnnnnnnnnnnnnnnnnnnnnnnnnnnnnnnnnnnnnnnnnnnnnnnnnnnnnnnnnnnnnnnnnnnnnnnnnnnnnnnnnnnnnnnnnnnnnnnnnnnnnnnnnnnnnnnnnnnnnnnnnnnnnnnnnnnnnnnnnnnnnnnnnnnnnnnnnnnnnnnnnnnnnnnnnnnnnnnnnnnnnnnnnnnnnnnnnnnnnnnnnnnnnnnnnnnnnnnnnnnnnnnnnnnnnnnnnnnnnnnnnnnnnnnnnnnnnnnnnnnnnnnnnnnnnnnnnnnnnnnnnnnnnnnnnnnnnnnnnnnnnnnnnnnnnnnnnnnnnnnnnnnnnnnnnnnnnnnnnnnnnnnnnnnnnnnnnnnnnnnnnnnnnnnnnnnnnnnnnnnnnnnnnnnnnnnnnnnnnnnnnnnnnnnnnnnnnnnnnnnnnnnnnnnnnnnnnnnnnnnnnnnnnnnnnnnnnnnnnnnnnnnnnnnnnnnnnnnnnnnnnnnnnnnnnnnnnnnnnnnnnnnnnnnnnnnnnnnnnnnnnnnnnnnnnnnnnnnnnnnnnnnnnnnnnnnnnnnnnnnnnnnnnnnnnnnnnnnnnnnnnnnnnnnnnnnnnnnnnnnnnnnnnnnnnnnnnnnnnnnnnnnnnnnnnnnnnnnnnnnnnnnnnnnnnnnnnnnnnnnnnnnnnnnnnnnnnnnnnnnnnnnnnnnnnnnnnnnnnnnnnnnnnnnnnnnnnnnnnnnnnnnnnnnnnnnnnnnnnnnnnnnnnnnnnnnnnnnnnnnnnnnnnnnnnnnnnnnnnnnnnnnnnnnnnnnnnnnnnnnnnnnnnnnnnnnnnnnnnnnnnnnnnnnnnnnnnnnnnnnnnnnnnnnnnnnnnnnnnnnnnnnnnnnnnnnnnnnnnnnnnnnnnnnnnnnnnnnnnnnnnnnnnnnnnnnnnnnnnnnnnnnnnnnnnnnnnnnnnnnnnnnnnnnnnnnnnnnnnnnnnnnnnnnnnnnnnnnnnnnnnnnnnnnnnnnnnnnnnnnnnnnnnnnnnnnnnnnnnnnnnnnnnnnnnnnnnnnnnnnnnnnnnnnnnnnnnnnnnnnnnnnnnnnnnnnnnnnnnnnnnnnnnnnnnnnnnnnnnnnnnnnnnnnnnnnnnnnnnnnnnnnnnnnnnnnnnnnnnnnnnnnnnnnnnnnnnnnnnnnnnnnnnnnnnnnnnnnnnnnnnnnnnnnnnnnnnnnnnnnnnnnnnnnnnnnnnnnnnnnnnnnnnnnnnnnnnnnnnnnnnnnnnnnnnnnnnnnnnnnnnnnnnnnnnnnnnnnnnnnnnnnnnnnnnnnnnnnnnnnnnnnnnnnnnnnnnnnnnnnnnnnnnnnnnnnnnnnnnnnnnnnnnnnnnnnnnnnnnnnnnnnnnnnnnnnnnnnnnnnnnnnnnnnnnnnnnnnnnnnnnnnnnnnnnnnnnnnnnnnnnnnnnnnnnnnnnnnnnnnnnnnnnnnnnnnnnnnnnnnnnnnnnnnnnnnnnnnnnnnnnnnnnnnnnnnnnnnnnnnnnnnnnnnnnnnnnnnnnnnnnnnnnnnnnnnnnnnnnnnnnnnnnnnnnnnnnnnnnnnnnnnnnnnnnnnnnnnnnnnnnnnnnnnnnnnnnnnnnnnnnnnnnnnnnnnnnnnnnnnnnnnnnnnnnnnnnnnnnnnnnnnnnnnnnnnnnnnnnnnnnnnnnnnnnnnnnnnnnnnnnnnnnnnnnnnnnnnnnnnnnnnnnnnnnnnnnnnnnnnnnnnnnnnnnnnnnnnnnnnnnnnnnnnnnnnnnnnnnnnnnnnnnnnnnnnnnnnnnnnnnnnnnnnnnnnnnnnnnnnnnnnnnnnnnnnnnnnnnnnnnnnnnnnnnnnnnnnnnnnnnnnnnnnnnnnnnnnnnnnnnnnnnnnnnnnnnnnnnnnnnnnnnnnnnnnnnnnnnnnnnnnnnnnnnnnnnnnnnnnnnnnnnnnnnnnnnnnnnnnnnnnnnnnnnnnnnnnnnnnnnnnnnnnnnnnnnnnnnnnnnnnnnnnnnnnnnnnnnnnnnnnnnnnnnnnnnnnnnnnnnnnnnnnnnnnnnnnnnnnnnnnnnnnnnnnnnnnnnnnnnnnnnnnnnnnnnnnnnnnnnnnnnnnnnnnnnnnnnnnnnnnnnnnnnnnnnnnnnnnnnnnnnnnnnnnnnnnnnnnnnnnnnnnnnnnnnnnnnnnnnnnnnnnnnnnnnnnnnnnnnnnnnnnnnnnnnnnnnnnnnnnnnnnnnnnnnnnnnnnnnnnnnnnnnnnnnnnnnnnnnnnnnnnnnnnnnnnnnnnnnnnnnnnnnnnnnnnnnnnnnnnnnnnnnnnnnnnnnnnnnnnnnnnnnnnnnnnnnnnnnnnnnnnnnnnnnnnnnnnnnnnnnnnnnnnnnnnnnnnnnnnnnnnnnnnnnnnnnnnnnnnnnnnnnnnnnnnnnnnnnnnnnnnnnnnnnnnnnnnnnnnnnnnnnnnnnnnnnnnnnnnnnnnnnnnnnnnnnnnnnnnnnnnnnnnnnnnnnnnnnnnnnnnnnnnnnnnnnnnnnnnnnnnnnnnnnnnnnnnnnnnnnnnnnnnnnnnnnnnnnnnnnnnnnnnnnnnnnnnnnnnnnnnnnnnnnnnnnnnnnnnnnnnnnnnnnnnnnnnnnnnnnnnnnnnnnnnnnnnnnnnnnnnnnnnnnnnnnnnnnnnnnnnnnnnnnnnnnnnnnnnnnnnnnnnnnnnnnnnnnnnnnnnnnnnnnnnnnnnnnnnnnnnnnnnnnnnnnnnnnnnnnnnnnnnnnnnnnnnnnnnnnnnnnnnnnnnnnnnnnnnnnnnnnnnnnnnnnnnnnnnnnnnnnnnnnnnnnnnnnnnnnnnnnnnnnnnnnnnnnnnnnnnnnnnnnnnnnnnnnnnnnnnnnnnnnnnnnnnnnnnnnnnnnnnnnnnnnnnnnnnnnnnnnnnnnnnnnnnnnnnnnnnnnnnnnnnnnnnnnnnnnnnnnnnnnnnnnnnnnnnnnnnnnnnnnnnnnnnnnnnnnnnnnnnnnnnnnnnnnnnnnnnnnnnnnnnnnnnnnnnnnnnnnnnnnnnnnnnnnnnnnnnnnnnnnnnnnnnnnnnnnnnnnnnnnnnnnnnnnnnnnnnnnnnnnnnnnnnnnnnnnnnnnnnnnnnnnnnnnnnnnnnnnnnnnnnnnnnnnnnnnnnnnnnnnnnnnnnnnnnnnnnnnnnnnnnnnnnnnnnnnnnnnnnnnnnnnnnnnnnnnnnnnnnnnnnnnnnnnnnnnnnnnnnnnnnnnnnnnnnnnnnnnnnnnnnnnnnnnnnnnnnnnnnnnnnnnnnnnnnnnnnnnnnnnnnnnnnnnnnnnnnnnnnnnnnnnnnnnnnnnnnnnnnnnnnnnnnnnnnnnnnnnnnnnnnnnnnnnnnnnnnnnnnnnnnnnnnnnnnnnnnnnnnnnnnnnnnnnnnnnnnnnnnnnnnnnnnnnnnnnnnnnnnnnnnnnnnnnnnnnnnnnnnnnnnnnnnnnnnnnnnnnnnnnnnnnnnnnnnnnnnnnnnnnnnnnnnnnnnnnnnnnnnnnnnnnnnnnnnnnnnnnnnnnnnnnnnnnnnnnnnnnnnnnnnnnnnnnnnnnnnnnnnnnnnnnnnnnnnnnnnnnnnnnnnnnnnnnnnnnnnnnnnnnnnnnnnnnnnnnnnnnnnnnnnnnnnnnnnnnnnnnnnnnnnnnnnnnnnnnnnnnnnnnnnnnnnnnnnnnnnnnnnnnnnnnnnnnnnnnnnnnnnnnnnnnnnnnnnnnnnnnnnnnnnnnnnnnnnnnnnnnnnnnnnnnnnnnnnnnnnnnnnnnnnnnnnnnnnnnnnnnnnnnnnnnnnnnnnnnnnnnnnnnnnnnnnnnnnnnnnnnnnnnnnnnnnnnnnnnnnnnnnnnnnnnnnnnnnnnnnnnnnnnnnnnnnnnnnnnnnnnnnnnnnnnnnnnnnnnnnnnnnnnnnnnnnnnnnnnnnnnnnnnnnnnnnnnnnnnnnnnnnnnnnnnnnnnnnnnnnnnnnnnnnnnnnnnnnnnnnnnnnnnnnnnnnnnnnnnnnnnnnnnnnnnnnnnnnnnnnnnnnnnnnnnnnnnnnnnnnnnnnnnnnnnnnnnnnnnnnnnnnnnnnnnnnnnnnnnnnnnnnnnnnnnnnnnnnnnnnnnnnnnnnnnnnnnnnnnnnnnnnnnnnnnnnnnnnnnnnnnnnnnnnnnnnnnnnnnnnnnnnnnnnnnnnnnnnnnnnnnnnnnnnnnnnnnnnnnnnnnnnnnnnnnnnnnnnnnnnnnnnnnnnnnnnnnnnnnnnnnnnnnnnnnnnnnnnnnnnnnnnnnnnnnnnnnnnnnnnnnnnnnnnnnnnnnnnnnnnnnnnnnnnnnnnnnnnnnnnnnnnnnnnnnnnnnnnnnnnnnnnnnnnnnnnnnnnnnnnnnnnnnnnnnnnnnnnnnnnnnnnnnnnnnnnnnnnnnnnnnnnnnnnnnnnnnnnnnnnnnnnnnnnnnnnnnnnnnnnnnnnnnnnnnnnnnnnnnnnnnnnnnnnnnnnnnnnnnnnnnnnnnnnnnnnnnnnnnnnnnnnnnnnnnnnnnnnnnnnnnnnnnnnnnnnnnnnnnnnnnnnnnnnnnnnnnnnnnnnnnnnnnnnnnnnnnnnnnnnnnnnnnnnnnnnnnnnnnnnnnnnnnnnnnnnnnnnnnnnnnnnnnnnnnnnnnnnnnnnnnnnnnnnnnnnnnnnnnnnnnnnnnnnnnnnnnnnnnnnnnnnnnnnnnnnnnnnnnnnnnnnnnnnnnnnnnnnnnnnnnnnnnnnnnnnnnnnnnnnnnnnnnnnnnnnnnnnnnnnnnnnnnnnnnnnnnnnnnnnnnnnnnnnnnnnnnnnnnnnnnnnnnnnnnnnnnnnnnnnnnnnnnnnnnnnnnnnnnnnnnnnnnnnnnnnnnnnnnnnnnnnnnnnnnnnnnnnnnnnnnnnnnnnnnnnnnnnnnnnnnnnnnnnnnnnnnnnnnnnnnnnnnnnnnnnnnnnnnnnnnnnnnnnnnnnnnnnnnnnnnnnnnnnnnnnnnnnnnnnnnnnnnnnnnnnnnnnnnnnnnnnnnnnnnnnnnnnnnnnnnnnnnnnnnnnnnnnnnnnnnnnnnnnnnnnnnnnnnnnnnnnnnnnnnnnnnnnnnnnnnnnnnnnnnnnnnnnnnnnnnnnnnnnnnnnnnnnnnnnnnnnnnnnnnnnnnnnnnnnnnnnnnnnnnnnnnnnnnnnnnnnnnnnnnnnnnnnnnnnnnnnnnnnnnnnnnnnnnnnnnnnnnnnnnnnnnnnnnnnnnnnnnnnnnnnnnnnnnnnnnnnnnnnnnnnnnnnnnnnnnnnnnnnnnnnnnnnnnnnnnnnnnnnnnnnnnnnnnnnnnnnnnnnnnnnnnnnnnnnnnnnnnnnnnnnnnnnnnnnnnnnnnnnnnnnnnnnnnnnnnnnnnnnnnnnnnnnnnnnnnnnnnnnnnnnnnnnnnnnnnnnnnnnnnnnnnnnnnnnnnnnnnnnnnnnnnnnnnnnnnnnnnnnnnnnnnnnnnnnnnnnnnnnnnnnnnnnnnnnnnnnnnnnnnnnnnnnnnnnnnnnnnnnnnnnnnnnnnnnnnnnnnnnnnnnnnnnnnnnnnnnnnnnnnnnnnnnnnnnnnnnnnnnnnnnnnnnnnnnnnnnnnnnnnnnnnnnnnnnnnnnnnnnnnnnnnnnnnnnnnnnnnnnnnnnnnnnnnnnnnnnnnnnnnnnnnnnnnnnnnnnnnnnnnnnnnnnnnnnnnnnnnnnnnnnnnnnnnnnnnnnnnnnnnnnnnnnnnnnnnnnnnnnnnnnnnnnnnnnnnnnnnnnnnnnnnnnnnnnnnnnnnnnnnnnnnnnnnnnnnnnnnnnnnnnnnnnnnnnnnnnnnnnnnnnnnnnnnnnnnnnnnnnnnnnnnnnnnnnnnnnnnnnnnnnnnnnnnnnnnnnnnnnnnnnnnnnnnnnnnnnnnnnnnnnnnnnnnnnnnnnnnnnnnnnnnnnnnnnnnnnnnnnnnnnnnnnnnnnnnnnnnnnnnnnnnnnnnnnnnnnnnnnnnnnnnnnnnnnnnnnnnnnnnnnnnnnnnnnnnnnnnnnnnnnnnnnnnnnnnnnnnnnnnnnnnnnnnnnnnnnnnnnnnnnnnnnnnnnnnnnnnnnnnnnnnnnnnnnnnnnnnnnnnnnnnnnnnnnnnnnnnnnnnnnnnnnnnnnnnnnnnnnnnnnnnnnnnnnnnnnnnnnnnnnnnnnnnnnnnnnnnnnnnnnnnnnnnnnnnnnnnnnnnnnnnnnnnnnnnnnnnnnnnnnnnnnnnnnnnnnnnnnnnnnnnnnnnnnnnnnnnnnnnnnnnnnnnnnnnnnnnnnnnnnnnnnnnnnnnnnnnnnnnnnnnnnnnnnnnnnnnnnnnnnnnnnnnnnnnnnnnnnnnnnnnnnnnnnnnnnnnnnnnnnnnnnnnnnnnnnnnnnnnnnnnnnnnnnnnnnnnnnnnnnnnnnnnnnnnnnnnnnnnnnnnnnnnnnnnnnnnnnnnnnnnnnnnnnnnnnnnnnnnnnnnnnnnnnnnnnnnnnnnnnnnnnnnnnnnnnnnnnnnnnnnnnnnnnnnnnnnnnnnnnnnnnnnnnnnnnnnnnnnnnnnnnnnnnnnnnnnnnnnnnnnnnnnnnnnnnnnnnnnnnnnnnnnnnnnnnnnnnnnnnnnnnnnnnnnnnnnnnnnnnnnnnnnnnnnnnnnnnnnnnnnnnnnnnnnnnnnnnnnnnnnnnnnnnnnnnnnnnnnnnnnnnnnnnnnnnnnnnnnnnnnnnnnnnnnnnnnnnnnnnnnnnnnnnnnnnnnnnnnnnnnnnnnnnnnnnnnnnnnnnnnnnnnnnnnnnnnnnnnnnnnnnnnnnnnnnnnnnnnnnnnnnnnnnnnnnnnnnnnnnnnnnnnnnnnnnnnnnnnnnnnnnnnnnnnnnnnnnnnnnnnnnnnnnnnnnnnnnnnnnnnnnnnnnnnnnnnnnnnnnnnnnnnnnnnnnnnnnnnnnnnnnnnnnnnnnnnnnnnnnnnnnnnnnnnnnnnnnnnnnnnnnnnnnnnnnnnnnnnnnnnnnnnnnnnnnnnnnnnnnnnnnnnnnnnnnnnnnnnnnnnnnnnnnnnnnnnnnnnnnnnnnnnnnnnnnnnnnnnnnnnnnnnnnnnnnnnnnnnnnnnnnnnnnnnnnnnnnnnnnnnnnnnnnnnnnnnnnnnnnnnnnnnnnnnnnnnnnnnnnnnnnnnnnnnnnnnnnnnnnnnnnnnnnnnnnnnnnnnnnnnnnnnnnnnnnnnnnnnnnnnnnnnnnnnnnnnnnnnnnnnnnnnnnnnnnnnnnnnnnnnnnnnnnnnnnnnnnnnnnnnnnnnnnnnnnnnnnnnnnnnnnnnnnnnnnnnnnnnnnnnnnnnnnnnnnnnnnnnnnnnnnnnnnnnnnnnnnnnnnnnnnnnnnnnnnnnnnnnnnnnnnnnnnnnnnnnnnnnnnnnnnnnnnnnnnnnnnnnnnnnnnnnnnnnnnnnnnnnnnnnnnnnnnnnnnnnnnnnnnnnnnnnnnnnnnnnnnnnnnnnnnnnnnnnnnnnnnnnnnnnnnnnnnnnnnnnnnnnnnnnnnnnnnnnnnnnnnnnnnnnnnnnnnnnnnnnnnnnnnnnnnnnnnnnnnnnnnnnnnnnnnnnnnnnnnnnnnnnnnnnnnnnnnnnnnnnnnnnnnnnnnnnnnnnnnnnnnnnnnnnnnnnnnnnnnnnnnnnnnnnnnnnnnnnnnnnnnnnnnnnnnnnnnnnnnnnnnnnnnnnnnnnnnnnnnnnnnnnnnnnnnnnnnnnnnnnnnnnnnnnnnnnnnnnnnnnnnnnnnnnnnnnnnnnnnnnnnnnnnnnnnnnnnnnnnnnnnnnnnnnnnnnnnnnnnnnnnnnnnnnnnnnnnnnnnnnnnnnnnnnnnnnnnnnnnnnnnnnnnnnnnnnnnnnnnnnnnnnnnnnnnnnnnnnnnnnnnnnnnnnnnnnnnnnnnnnnnnnnnnnnnnnnnnnnnnnnnnnnnnnnnnnnnnnnnnnnnnnnnnnnnnnnnnnnnnnnnnnnnnnnnnnnnnnnnnnnnnnnnnnnnnnnnnnnnnnnnnnnnnnnnnnnnnnnnnnnnnnnnnnnnnnnnnnnnnnnnnnnnnnnnnnnnnnnnnnnnnnnnnnnnnnnnnnnnnnnnnnnnnnnnnnnnnnnnnnnnnnnnnnnnnnnnnnnnnnnnnnnnnnnnnnnnnnnnnnnnnnnnnnnnnnnnnnnnnnnnnnnnnnnnnnnnnnnnnnnnnnnnnnnnnnnnnnnnnnnnnnnnnnnnnnnnnnnnnnnnnnnnnnnnnnnnnnnnnnnnnnnnnnnnnnnnnnnnnnnnnnnnnnnnnnnnnnnnnnnnnnnnnnnnnnnnnnnnnnnnnnnnnnnnnnnnnnnnnnnnnnnnnnnnnnnnnnnnnnnnnnnnnnnnnnnnnnnnnnnnnnnnnnnnnnnnnnnnnnnnnnnnnnnnnnnnnnnnnnnnnnnnnnnnnnnnnnnnnnnnnnnnnnnnnnnnnnnnnnnnnnnnnnnnnnnnnnnnnnnnnnnnnnnnnnnnnnnnnnnnnnnnnnnnnnnnnnnnnnnnnnnnnnnnnnnnnnnnnnnnnnnnnnnnnnnnnnnnnnnnnnnnnnnnnnnnnnnnnnnnnnnnnnnnnnnnnnnnnnnnnnnnnnnnnnnnnnnnnnnnnnnnnnnnnnnnnnnnnnnnnnnnnnnnnnnnnnnnnnnnnnnnnnnnnnnnnnnnnnnnnnnnnnnnnnnnnnnnnnnnnnnnnnnnnnnnnnnnnnnnnnnnnnnnnnnnnnnnnnnnnnnnnnnnnnnnnnnnnnnnnnnnnnnnnnnnnnnnnnnnnnnnnnnnnnnnnnnnnnnnnnnnnnnnnnnnnnnnnnnnnnnnnnnnnnnnnnnnnnnnnnnnnnnnnnnnnnnnnnnnnnnnnnnnnnnnnnnnnnnnnnnnnnnnnnnnnnnnnnnnnnnnnnnnnnnnnnnnnnnnnnnnnnnnnnnnnnnnnnnnnnnnnnnnnnnnnnnnnnnnnnnnnnnnnnnnnnnnnnnnnnnnnnnnnnnnnnnnnnnnnnnnnnnnnnnnnnnnnnnnnnnnnnnnnnnnnnnnnnnnnnnnnnnnnnnnnnnnnnnnnnnnnnnnnnnnnnnnnnnnnnnnnnnnnnnnnnnnnnnnnnnnnnnnnnnnnnnnnnnnnnnnnnnnnnnnnnnnnnnnnnnnnnnnnnnnnnnnnnnnnnnnnnnnnnnnnnnnnnnnnnnnnnnnnnnnnnnnnnnnnnnnnnnnnnnnnnnnnnnnnnnnnnnnnnnnnnnnnnnnnnnnnnnnnnnnnnnnnnnnnnnnnnnnnnnnnnnnnnnnnnnnnnnnnnnnnnnnnnnnnnnnnnnnnnnnnnnnnnnnnnnnnnnnnnnnnnnnnnnnnnnnnnnnnnnnnnnnnnnnnnnnnnnnnnnnnnnnnnnnnnnnnnnnnnnnnnnnnnnnnnnnnnnnnnnnnnnnnnnnnnnnnnnnnnnnnnnnnnnnnnnnnnnnnnnnnnnnnnnnnnnnnnnnnnnnnnnnnnnnnnnnnnnnnnnnnnnnnnnnnnnnnnnnnnnnnnnnnnnnnnnnnnnnnnnnnnnnnnnnnnnnnnnnnnnnnnnnnnnnnnnnnnnnnnnnnnnnnnnnnnnnnnnnnnnnnnnnnnnnnnnnnnnnnnnnnnnnnnnnnnnnnnnnnnnnnnnnnnnnnnnnnnnnnnnnnnnnnnnnnnnnnnnnnnnnnnnnnnnnnnnnnnnnnnnnnnnnnnnnnnnnnnnnnnnnnnnnnnnnnnnnnnnnnnnnnnnnnnnnnnnnnnnnnnnnnnnnnnnnnnnnnnnnnnnnnnnnnnnnnnnnnnnnnnnnnnnnnnnnnnnnnnnnnnnnnnnnnnnnnnnnnnnnnnnnnnnnnnnnnnnnnnnnnnnnnnnnnnnnnnnnnnnnnnnnnnnnnnnnnnnnnnnnnnnnnnnnnnnnnnnnnnnnnnnnnnnnnnnnnnnnnnnnnnnnnnnnnnnnnnnnnnnnnnnnnnnnnnnnnnnnnnnnnnnnnnnnnnnnnnnnnnnnnnnnnnnnnnnnnnnnnnnnnnnnnnnnnnnnnnnnnnnnnnnnnnnnnnnnnnnnnnnnnnnnnnnnnnnnnnnnnnnnnnnnnnnnnnnnnnnnnnnnnnnnnnnnnnnnnnnnnnnnnnnnnnnnnnnnnnnnnnnnnnnnnnnnnnnnnnnnnnnnnnnnnnnnnnnnnnnnnnnnnnnnnnnnnnnnnnnnnnnnnnnnnnnnnnnnnnnnnnnnnnnnnnnnnnnnnnnnnnnnnnnnnnnnnnnnnnnnnnnnnnnnnnnnnnnnnnnnnnnnnnnnnnnnnnnnnnnnnnnnnnnnnnnnnnnnnnnnnnnnnnnnnnnnnnnnnnnnnnnnnnnnnnnnnnnnnnnnnnnnnnnnnnnnnnnnnnnnnnnnnnnnnnnnnnnnnnnnnnnnnnnnnnnnnnnnnnnnnnnnnnnnnnnnnnnnnnnnnnnnnnnnnnnnnnnnnnnnnnnnnnnnnnnnnnnnnnnnnnnnnnnnnnnnnnnnnnnnnnnnnnnnnnnnnnnnnnnnnnnnnnnnnnnnnnnnnnnnnnnnnnnnnnnnnnnnnnnnnnnnnnnnnnnnnnnnnnnnnnnnnnnnnnnnnnnnnnnnnnnnnnnnnnnnnnnnnnnnnnnnnnnnnnnnnnnnnnnnnnnnnnnnnnnnnnnnnnnnnnnnnnnnnnnnnnnnnnnnnnnnnnnnnnnnnnnnnnnnnnnnnnnnnnnnnnnnnnnnnnnnnnnnnnnnnnnnnnnnnnnnnnnnnnnnnnnnnnnnnnnnnnnnnnnnnnnnnnnnnnnnnnnnnnnnnnnnnnnnnnnnnnnnnnnnnnnnnnnnnnnnnnnnnnnnnnnnnnnnnnnnnnnnnnnnnnnnnnnnnnnnnnnnnnnnnnnnnnnnnnnnnnnnnnnnnnnnnnnnnnnnnnnnnnnnnnnnnnnnnnnnnnnnnnnnnnnnnnnnnnnnnnnnnnnnnnnnnnnnnnnnnnnnnnnnnnnnnnnnnnnnnnnnnnnnnnnnnnnnnnnnnnnnnnnnnnnnnnnnnnnnnnnnnnnnnnnnnnnnnnnnnnnnnnnnnnnnnnnnnnnnnnnnnnnnnnnnnnnnnnnnnnnnnnnnnnnnnnnnnnnnnnnnnnnnnnnnnnnnnnnnnnnnnnnnnnnnnnnnnnnnnnnnnnnnnnnnnnnnnnnnnnnnnnnnnnnnnnnnnnnnnnnnnnnnnnnnnnnnnnnnnnnnnnnnnnnnnnnnnnnnnnnnnnnnnnnnnnnnnnnnnnnnnnnnnnnnnnnnnnnnnnnnnnnnnnnnnnnnnnnnnnnnnnnnnnnnnnnnnnnnnnnnnnnnnnnnnnnnnnnnnnnnnnnnnnnnnnnnnnnnnnnnnnnnnnnnnnnnnnnnnnnnnnnnnnnnnnnnnnnnnnnnnnnnnnnnnnnnnnnnnnnnnnnnnnnnnnnnnnnnnnnnnnnnnnnnnnnnnnnnnnnnnnnnnnnnnnnnnnnnnnnnnnnnnnnnnnnnnnnnnnnnnnnnnnnnnnnnnnnnnnnnnnnnnnnnnnnnnnnnnnnnnnnnnnnnnnnnnnnnnnnnnnnnnnnnnnnnnnnnnnnnnnnnnnnnnnnnnnnnnnnnnnnnnnnnnnnnnnnnnnnnnnnnnnnnnnnnnnnnnnnnnnnnnnnnnnnnnnnnnnnnnnnnnnnnnnnnnnnnnnnnnnnnnnnnnnnnnnnnnnnnnnnnnnnnnnnnnnnnnnnnnnnnnnnnnnnnnnnnnnnnnnnnnnnnnnnnnnnnnnnnnnnnnnnnnnnnnnnnnnnnnnnnnnnnnnnnnnnnnnnnnnnnnnnnnnnnnnnnnnnnnnnnnnnnnnnnnnnnnnnnnnnnnnnnnnnnnnnnnnnnnnnnnnnnnnnnnnnnnnnnnnnnnnnnnnnnnnnnnnnnnnnnnnnnnnnnnnnnnnnnnnnnnnnnnnnnnnnnnnnnnnnnnnnnnnnnnnnnnnnnnnnnnnnnnnnnnnnnnnnnnnnnnnnnnnnnnnnnnnnnnnnnnnnnnnnnnnnnnnnnnnnnnnnnnnnnnnnnnnnnnnnnnnnnnnnnnnnnnnnnnnnnnnnnnnnnnnnnnnnnnnnnnnnnnnnnnnnnnnnnnnnnnnnnnnnnnnnnnnnnnnnnnnnnnnnnnnnnnnnnnnnnnnnnnnnnnnnnnnnnnnnnnnnnnnnnnnnnnnnnnnnnnnnnnnnnnnnnnnnnnnnnnnnnnnnnnnnnnnnnnnnnnnnnnnnnnnnnnnnnnnnnnnnnnnnnnnnnnnnnnnnnnnnnnnnnnnnnnnnnnnnnnnnnnnnnnnnnnnnnnnnnnnnnnnnnnnnnnnnnnnnnnnnnnnnnnnnnnnnnnnnnnnnnnnnnnnnnnnnnnnnnnnnnnnnnnnnnnnnnnnnnnnnnnnnnnnnnnnnnnnnnnnnnnnnnnnnnnnnnnnnnnnnnnnnnnnnnnnnnnnnnnnnnnnnnnnnnnnnnnnnnnnnnnnnnnnnnnnnnnnnnnnnnnnnnnnnnnnnnnnnnnnnnnnnnnnnnnnnnnnnnnnnnnnnnnnnnnnnnnnnnnnnnnnnnnnnnnnnnnnnnnnnnnnnnnnnnnnnnnnnnnnnnnnnnnnnnnnnnnnnnnnnnnnnnnnnnnnnnnnnnnnnnnnnnnnnnnnnnnnnnnnnnnnnnnnnnnnnnnnnnnnnnnnnnnnnnnnnnnnnnnnnnnnnnnnnnnnnnnnnnnnnnnnnnnnnnnnnnnnnnnnnnnnnnnnnnnnnnnnnnnnnnnnnnnnnnnnnnnnnnnnnnnnnnnnnnnnnnnnnnnnnnnnnnnnnnnnnnnnnnnnnnnnnnnnnnnnnnnnnnnnnnnnnnnnnnnnnnnnnnnnnnnnnnnnnnnnnnnnnnnnnnnnnnnnnnnnnnnnnnnnnnnnnnnnnnnnnnnnnnnnnnnnnnnnnnnnnnnnnnnnnnnnnnnnnnnnnnnnnnnnnnnnnnnnnnnnnnnnnnnnnnnnnnnnnnnnnnnnnnnnnnnnnnnnnnnnnnnnnnnnnnnnnnnnnnnnnnnnnnnnnnnnnnnnnnnnnnnnnnnnnnnnnnnnnnnnnnnnnnnnnnnnnnnnnnnnnnnnnnnnnnnnnnnnnnnnnnnnnnnnnnnnnnnnnnnnnnnnnnnnnnnnnnnnnnnnnnnnnnnnnnnnnnnnnnnnnnnnnnnnnnnnnnnnnnnnnnnnnnnnnnnnnnnnnnnnnnnnnnnnnnnnnnnnnnnnnnnnnnnnnnnnnnnnnnnnnnnnnnnnnnnnnnnnnnnnnnnnnnnnnnnnnnnnnnnnnnnnnnnnnnnnnnnnnnnnnnnnnnnnnnnnnnnnnnnnnnnnnnnnnnnnnnnnnnnnnnnnnnnnnnnnnnnnnnnnnnnnnnnnnnnnnnnnnnnnnnnnnnnnnnnnnnnnnnnnnnnnnnnnnnnnnnnnnnnnnnnnnnnnnnnnnnnnnnnnnnnnnnnnnnnnnnnnnnnnnnnnnnnnnnnnnnnnnnnnnnnnnnnnnnnnnnnnnnnnnnnnnnnnnnnnnnnnnnnnnnnnnnnnnnnnnnnnnnnnnnnnnnnnnnnnnnnnnnnnnnnnnnnnnnnnnnnnnnnnnnnnnnnnnnnnnnnnnnnnnnnnnnnnnnnnnnnnnnnnnnnnnnnnnnnnnnnnnnnnnnnnnnnnnnnnnnnnnnnnnnnnnnnnnnnnnnnnnnnnnnnnnnnnnnnnnnnnnnnnnnnnnnnnnnnnnnnnnnnnnnnnnnnnnnnnnnnnnnnnnnnnnnnnnnnnnnnnnnnnnnnnnnnnnnnnnnnnnnnnnnnnnnnnnnnnnnnnnnnnnnnnnnnnnnnnnnnnnnnnnnnnnnnnnnnnnnnnnnnnnnnnnnnnnnnnnnnnnnnnnnnnnnnnnnnnnnnnnnnnnnnnnnnnnnnnnnnnnnnnnnnnnnnnnnnnnnnnnnnnnnnnnnnnnnnnnnnnnnnnnnnnnnnnnnnnnnnnnnnnnnnnnnnnnnnnnnnnnnnnnnnnnnnnnnnnnnnnnnnnnnnnnnnnnnnnnnnnnnnnnnnnnnnnnnnnnnnnnnnnnnnnnnnnnnnnnnnnnnnnnnnnnnnnnnnnnnnnnnnnnnnnnnnnnnnnnnnnnnnnnnnnnnnnnnnnnnnnnnnnnnnnnnnnnnnnnnnnnnnnnnnnnnnnnnnnnnnnnnnnnnnnnnnnnnnnnnnnnnnnnnnnnnnnnnnnnnnnnnnnnnnnnnnnnnnnnnnnnnnnnnnnnnnnnnnnnnnnnnnnnnnnnnnnnnnnnnnnnnnnnnnnnnnnnnnnnnnnnnnnnnnnnnnnnnnnnnnnnnnnnnnnnnnnnnnnnnnnnnnnnnnnnnnnnnnnnnnnnnnnnnnnnnnnnnnnnnnnnnnnnnnnnnnnnnnnnnnnnnnnnnnnnnnnnnnnnnnnnnnnnnnnnnnnnnnnnnnnnnnnnnnnnnnnnnnnnnnnnnnnnnnnnnnnnnnnnnnnnnnnnnnnnnnnnnnnnnnnnnnnnnnnnnnnnnnnnnnnnnnnnnnnnnnnnnnnnnnnnnnnnnnnnnnnnnnnnnnnnnnnnnnnnnnnnnnnnnnnnnnnnnnnnnnnnnnnnnnnnnnnnnnnnnnnnnnnnnnnnnnnnnnnnnnnnnnnnnnnnnnnnnnnnnnnnnnnnnnnnnnnnnnnnnnnnnnnnnnnnnnnnnnnnnnnnnnnnnnnnnnnnnnnnnnnnnnnnnnnnnnnnnnnnnnnnnnnnnnnnnnnnnnnnnnnnnnnnnnnnnnnnnnnnnnnnnnnnnnnnnnnnnnnnnnnnnnnnnnnnnnnnnnnnnnnnnnnnnnnnnnnnnnnnnnnnnnnnnnnnnnnnnnnnnnnnnnnnnnnnnnnnnnnnnnnnnnnnnnnnnnnnnnnnnnnnnnnnnnnnnnnnnnnnnnnnnnnnnnnnnnnnnnnnnnnnnnnnnnnnnnnnnnnnnnnnnnnnnnnnnnnnnnnnnnnnnnnnnnnnnnnnnnnnnnnnnnnnnnnnnnnnnnnnnnnnnnnnnnnnnnnnnnnnnnnnnnnnnnnnnnnnnnnnnnnnnnnnnnnnnnnnnnnnnnnnnnnnnnnnnnnnnnnnnnnnnnnnnnnnnnnnnnnnnnnnnnnnnnnnnnnnnnnnnnnnnnnnnnnnnnnnnnnnnnnnnnnnnnnnnnnnnnnnnnnnnnnnnnnnnnnnnnnnnnnnnnnnnnnnnnnnnnnnnnnnnnnnnnnnnnnnnnnnnnnnnnnnnnnnnnnnnnnnnnnnnnnnnnnnnnnnnnnnnnnnnnnnnnnnnnnnnnnnnnnnnnnnnnnnnnnnnnnnnnnnnnnnnnnnnnnnnnnnnnnnnnnnnnnnnnnnnnnnnnnnnnnnnnnnnnnnnnnnnnnnnnnnnnnnnnnnnnnnnnnnnnnnnnnnnnnnnnnnnnnnnnnnnnnnnnnnnnnnnnnnnnnnnnnnnnnnnnnnnnnnnnnnnnnnnnnnnnnnnnnnnnnnnnnnnnnnnnnnnnnnnnnnnnnnnnnnnnnnnnnnnnnnnnnnnnnnnnnnnnnnnnnnnnnnnnnnnnnnnnnnnnnnnnnnnnnnnnnnnnnnnnnnnnnnnnnnnnnnnnnnnnnnnnnnnnnnnnnnnnnnnnnnnnnnnnnnnnnnnnnnnnnnnnnnnnnnnnnnnnnnnnnnnnnnnnnnnnnnnnnnnnnnnnnnnnnnnnnnnnnnnnnnnnnnnnnnnnnnnnnnnnnnnnnnnnnnnnnnnnnnnnnnnnnnnnnnnnnnnnnnnnnnnnnnnnnnnnnnnnnnnnnnnnnnnnnnnnnnnnnnnnnnnnnnnnnnnnnnnnnnnnnnnnnnnnnnnnnnnnnnnnnnnnnnnnnnnnnnnnnnnnnnnnnnnnnnnnnnnnnnnnnnnnnnnnnnnnnnnnnnnnnnnnnnnnnnnnnnnnnnnnnnnnnnnnnnnnnnnnnnnnnnnnnnnnnnnnnnnnnnnnnnnnnnnnnnnnnnnnnnnnnnnnnnnnnnnnnnnnnnnnnnnnnnnnnnnnnnnnnnnnnnnnnnnnnnnnnnnnnnnnnnnnnnnnnnnnnnnnnnnnnnnnnnnnnnnnnnnnnnnnnnnnnnnnnnnnnnnnnnnnnnnnnnnnnnnnnnnnnnnnnnnnnnnnnnnnnnnnnnnnnnnnnnnnnnnnnnnnnnnnnnnnnnnnnnnnnnnnnnnnnnnnnnnnnnnnnnnnnnnnnnnnnnnnnnnnnnnnnnnnnnnnnnnnnnnnnnnnnnnnnnnnnnnnnnnnnnnnnnnnnnnnnnnnnnnnnnnnnnnnnnnnnnnnnnnnnnnnnnnnnnnnnnnnnnnnnnnnnnnnnnnnnnnnnnnnnnnnnnnnnnnnnnnnnnnnnnnnnnnnnnnnnnnnnnnnnnnnnnnnnnnnnnnnnnnnnnnnnnnnnnnnnnnnnnnnnnnnnnnnnnnnnnnnnnnnnnnnnnnnnnnnnnnnnnnnnnnnnnnnnnnnnnnnnnnnnnnnnnnnnnnnnnnnnnnnnnnnnnnnnnnnnnnnnnnnnnnnnnnnnnnnnnnnnnnnnnnnnnnnnnnnnnnnnnnnnnnnnnnnnnnnnnnnnnnnnnnnnnnnnnnnnnnnnnnnnnnnnnnnnnnnnnnnnnnnnnnnnnnnnnnnnnnnnnnnnnnnnnnnnnnnnnnnnnnnnnnnnnnnnnnnnnnnnnnnnnnnnnnnnnnnnnnnnnnnnnnnnnnnnnnnnnnnnnnnnnnnnnnnnnnnnnnnnnnnnnnnnnnnnnnnnnnnnnnnnnnnnnnnnnnnnnnnnnnnnnnnnnnnnnnnnnnnnnnnnnnnnnnnnnnnnnnnnnnnnnnnnnnnnnnnnnnnnnnnnnnnnnnnnnnnnnnnnnnnnnnnnnnnnnnnnnnnnnnnnnnnnnnnnnnnnnnnnnnnnnnnnnnnnnnnnnnnnnnnnnnnnnnnnnnnnnnnnnnnnnnnnnnnnnnnnnnnnnnnnnnnnnnnnnnnnnnnnnnnnnnnnnnnnnnnnnnnnnnnnnnnnnnnnnnnnnnnnnnnnnnnnnnnnnnnnnnnnnnnnnnnnnnnnnnnnnnnnnnnnnnnnnnnnnnnnnnnnnnnnnnnnnnnnnnnnnnnnnnnnnnnnnnnnnnnnnnnnnnnnnnnnnnnnnnnnnnnnnnnnnnnnnnnnnnnnnnnnnnnnnnnnnnnnnnnnnnnnnnnnnnnnnnnnnnnnnnnnnnnnnnnnnnnnnnnnnnnnnnnnnnnnnnnnnnnnnnnnnnnnnnnnnnnnnnnnnnnnnnnnnnnnnnnnnnnnnnnnnnnnnnnnnnnnnnnnnnnnnnnnnnnnnnnnnnnnnnnnnnnnnnnnnnnnnnnnnnnnnnnnnnnnnnnnnnnnnnnnnnnnnnnnnnnnnnnnnnnnnnnnnnnnnnnnnnnnnnnnnnnnnnnnnnnnnnnnnnnnnnnnnnnnnnnnnnnnnnnnnnnnnnnnnnnnnnnnnnnnnnnnnnnnnnnnnnnnnnnnnnnnnnnnnnnnnnnnnnnnnnnnnnnnnnnnnnnnnnnnnnnnnnnnnnnnnnnnnnnnnnnnnnnnnnnnnnnnnnnnnnnnnnnnnnnnnnnnnnnnnnnnnnnnnnnnnnnnnnnnnnnnnnnnnnnnnnnnnnnnnnnnnnnnnnnnnnnnnnnnnnnnnnnnnnnnnnnnnnnnnnnnnnnnnnnnnnnnnnnnnnnnnnnnnnnnnnnnnnnnnnnnnnnnnnnnnnnnnnnnnnnnnnnnnnnnnnnnnnnnnnnnnnnnnnnnnnnnnnnnnnnnnnnnnnnnnnnnnnnnnnnnnnnnnnnnnnnnnnnnnnnnnnnnnnnnnnnnnnnnnnnnnnnnnnnnnnnnnnnnnnnnnnnnnnnnnnnnnnnnnnnnnnnnnnnnnnnnnnnnnnnnnnnnnnnnnnnnnnnnnnnnnnnnnnnnnnnnnnnnnnnnnnnnnnnnnnnnnnnnnnnnnnnnnnnnnnnnnnnnnnnnnnnnnnnnnnnnnnnnnnnnnnnnnnnnnnnnnnnnnnnnnnnnnnnnnnnnnnnnnnnnnnnnnnnnnnnnnnnnnnnnnnnnnnnnnnnnnnnnnnnnnnnnnnnnnnnnnnnnnnnnnnnnnnnnnnnnnnnnnnnnnnnnnnnnnnnnnnnnnnnnnnnnnnnnnnnnnnnnnnnnnnnnnnnnnnnnnnnnnnnnnnnnnnnnnnnnnnnnnnnnnnnnnnnnnnnnnnnnnnnnnnnnnnnnnnnnnnnnnnnnnnnnnnnnnnnnnnnnnnnnnnnnnnnnnnnnnnnnnnnnnnnnnnnnnnnnnnnnnnnnnnnnnnnnnnnnnnnnnnnnnnnnnnnnnnnnnnnnnnnnnnnnnnnnnnnnnnnnnnnnnnnnnnnnnnnnnnnnnnnnnnnnnnnnnnnnnnnnnnnnnnnnnnnnnnnnnnnnnnnnnnnnnnnnnnnnnnnnnnnnnnnnnnnnnnnnnnnnnnnnnnnnnnnnnnnnnnnnnnnnnnnnnnnnnnnnnnnnnnnnnnnnnnnnnnnnnnnnnnnnnnnnnnnnnnnnnnnnnnnnnnnnnnnnnnnnnnnnnnnnnnnnnnnnnnnnnnnnnnnnnnnnnnnnnnnnnnnnnnnnnnnnnnnnnnnnnnnnnnnnnnnnnnnnnnnnnnnnnnnnnnnnnnnnnnnnnnnnnnnnnnnnnnnnnnnnnnnnnnnnnnnnnnnnnnnnnnnnnnnnnnnnnnnnnnnnnnnnnnnnnnnnnnnnnnnnnnnnnnnnnnnnnnnnnnnnnnnnnnnnnnnnnnnnnnnnnnnnnnnnnnnnnnnnnnnnnnnnnnnnnnnnnnnnnnnnnnnnnnnnnnnnnnnnnnnnnnnnnnnnnnnnnnnnnnnnnnnnnnnnnnnnnnnnnnnnnnnnnnnnnnnnnnnnnnnnnnnnnnnnnnnnnnnnnnnnnnnnnnnnnnnnnnnnnnnnnnnnnnnnnnnnnnnnnnnnnnnnnnnnnnnnnnnnnnnnnnnnnnnnnnnnnnnnnnnnnnnnnnnnnnnnnnnnnnnnnnnnnnnnnnnnnnnnnnnnnnnnnnnnnnnnnnnnnnnnnnnnnnnnnnnnnnnnnnnnnnnnnnnnnnnnnnnnnnnnnnnnnnnnnnnnnnnnnnnnnnnnnnnnnnnnnnnnnnnnnnnnnnnnnnnnnnnnnnnnnnnnnnnnnnnnnnnnnnnnnnnnnnnnnnnnnnnnnnnnnnnnnnnnnnnnnnnnnnnnnnnnnnnnnnnnnnnnnnnnnnnnnnnnnnnnnnnnnnnnnnnnnnnnnnnnnnnnnnnnnnnnnnnnnnnnnnnnnnnnnnnnnnnnnnnnnnnnnnnnnnnnnnnnnnnnnnnnnnnnnnnnnnnnnnnnnnnnnnnnnnnnnnnnnnnnnnnnnnnnnnnnnnnnnnnnnnnnnnnnnnnnnnnnnnnnnnnnnnnnnnnnnnnnnnnnnnnnnnnnnnnnnnnnnnnnnnnnnnnnnnnnnnnnnnnnnnnnnnnnnnnnnnnnnnnnnnnnnnnnnnnnnnnnnnnnnnnnnnnnnnnnnnnnnnnnnnnnnnnnnnnnnnnnnnnnnnnnnnnnnnnnnnnnnnnnnnnnnnnnnnnnnnnnnnnnnnnnnnnnnnnnnnnnnnnnnnnnnnnnnnnnnnnnnnnnnnnnnnnnnnnnnnnnnnnnnnnnnnnnnnnnnnnnnnnnnnnnnnnnnnnnnnnnnnnnnnnnnnnnnnnnnnnnnnnnnnnnnnnnnnnnnnnnnnnnnnnnnnnnnnnnnnnnnnnnnnnnnnnnnnnnnnnnnnnnnnnnnnnnnnnnnnnnnnnnnnnnnnnnnnnnnnnnnnnnnnnnnnnnnnnnnnnnnnnnnnnnnnnnnnnnnnnnnnnnnnnnnnnnnnnnnnnnnnnnnnnnnnnnnnnnnnnnnnnnnnnnnnnnnnnnnnnnnnnnnnnnnnnnnnnnnnnnnnnnnnnnnnnnnnnnnnnnnnnnnnnnnnnnnnnnnnnnnnnnnnnnnnnnnnnnnnnnnnnnnnnnnnnnnnnnnnnnnnnnnnnnnnnnnnnnnnnnnnnnnnnnnnnnnnnnnnnnnnnnnnnnnnnnnnnnnnnnnnnnnnnnnnnnnnnnnnnnnnnnnnnnnnnnnnnnnnnnnnnnnnnnnnnnnnnnnnnnnnnnnnnnnnnnnnnnnnnnnnnnnnnnnnnnnnnnnnnnnnnnnnnnnnnnnnnnnnnnnnnnnnnnnnnnnnnnnnnnnnnnnnnnnnnnnnnnnnnnnnnnnnnnnnnnnnnnnnnnnnnnnnnnnnnnnnnnnnnnnnnnnnnnnnnnnnnnnnnnnnnnnnnnnnnnnnnnnnnnnnnnnnnnnnnnnnnnnnnnnnnnnnnnnnnnnnnnnnnnnnnnnnnnnnnnnnnnnnnnnnnnnnnnnnnnnnnnnnnnnnnnnnnnnnnnnnnnnnnnnnnnnnnnnnnnnnnnnnnnnnnnnnnnnnnnnnnnnnnnnnnnnnnnnnnnnnnnnnnnnnnnnnnnnnnnnnnnnnnnnnnnnnnnnnnnnnnnnnnnnnnnnnnnnnnnnnnnnnnnnnnnnnnnnnnnnnnnnnnnnnnnnnnnnnnnnnnnnnnnnnnnnnnnnnnnnnnnnnnnnnnnnnnnnnnnnnnnnnnnnnnnnnnnnnnnnnnnnnnnnnnnnnnnnnnnnnnnnnnnnnnnnnnnnnnnnnnnnnnnnnnnnnnnnnnnnnnnnnnnnnnnnnnnnnnnnnnnnnnnnnnnnnnnnnnnnnnnnnnnnnnnnnnnnnnnnnnnnnnnnnnnnnnnnnnnnnnnnnnnnnnnnnnnnnnnnnnnnnnnnnnnnnnnnnnnnnnnnnnnnnnnnnnnnnnnnnnnnnnnnnnnnnnnnnnnnnnnnnnnnnnnnnnnnnnnnnnnnnnnnnnnnnnnnnnnnnnnnnnnnnnnnnnnnnnnnnnnnnnnnnnnnnnnnnnnnnnnnnnnnnnnnnnnnnnnnnnnnnnnnnnnnnnnnnnnnnnnnnnnnnnnnnnnnnnnnnnnnnnnnnnnnnnnnnnnnnnnnnnnnnnnnnnnnnnnnnnnnnnnnnnnnnnnnnnnnnnnnnnnnnnnnnnnnnnnnnnnnnnnnnnnnnnnnnnnnnnnnnnnnnnnnnnnnnnnnnnnnnnnnnnnnnnnnnnnnnnnnnnnnnnnnnnnnnnnnnnnnnnnnnnnnnnnnnnnnnnnnnnnnnnnnnnnnnnnnnnnnnnnnnnnnnnnnnnnnnnnnnnnnnnnnnnnnnnnnnnnnnnnnnnnnnnnnnnnnnnnnnnnnnnnnnnnnnnnnnnnnnnnnnnnnnnnnnnnnnnnnnnnnnnnnnnnnnnnnnnnnnnnnnnnnnnnnnnnnnnnnnnnnnnnnnnnnnnnnnnnnnnnnnnnnnnnnnnnnnnnnnnnnnnnnnnnnnnnnnnnnnnnnnnnnnnnnnnnnnnnnnnnnnnnnnnnnnnnnnnnnnnnnnnnnnnnnnnnnnnnnnnnnnnnnnnnnnnnnnnnnnnnnnnnnnnnnnnnnnnnnnnnnnnnnnnnnnnnnnnnnnnnnnnnnnnnnnnnnnnnnnnnnnnnnnnnnnnnnnnnnnnnnnnnnnnnnnnnnnnnnnnnnnnnnnnnnnnnnnnnnnnnnnnnnnnnnnnnnnnnnnnnnnnnnnnnnnnnnnnnnnnnnnnnnnnnnnnnnnnnnnnnnnnnnnnnnnnnnnnnnnnnnnnnnnnnnnnnnnnnnnnnnnnnnnnnnnnnnnnnnnnnnnnnnnnnnnnnnnnnnnnnnnnnnnnnnnnnnnnnnnnnnnnnnnnnnnnnnnnnnnnnnnnnnnnnnnnnnnnnnnnnnnnnnnnnnnnnnnnnnnnnnnnnnnnnnnnnnnnnnnnnnnnnnnnnnnnnnnnnnnnnnnnnnnnnnnnnnnnnnnnnnnnnnnnnnnnnnnnnnnnnnnnnnnnnnnnnnnnnnnnnnnnnnnnnnnnnnnnnnnnnnnnnnnnnnnnnnnnnnnnnnnnnnnnnnnnnnnnnnnnnnnnnnnnnnnnnnnnnnnnnnnnnnnnnnnnnnnnnnnnnnnnnnnnnnnnnnnnnnnnnnnnnnnnnnnnnnnnnnnnnnnnnnnnnnnnnnnnnnnnnnnnnnnnnnnnnnnnnnnnnnnnnnnnnnnnnnnnnnnnnnnnnnnnnnnnnnnnnnnnnnnnnnnnnnnnnnnnnnnnnnnnnnnnnnnnnnnnnnnnnnnnnnnnnnnnnnnnnnnnnnnnnnnnnnnnnnnnnnnnnnnnnnnnnnnnnnnnnnnnnnnnnnnnnnnnnnnnnnnnnnnnnnnnnnnnnnnnnnnnnnnnnnnnnnnnnnnnnnnnnnnnnnnnnnnnnnnnnnnnnnnnnnnnnnnnnnnnnnnnnnnnnnnnnnnnnnnnnnnnnnnnnnnnnnnnnnnnnnnnnnnnnnnnnnnnnnnnnnnnnnnnnnnnnnnnnnnnnnnnnnnnnnnnnnnnnnnnnnnnnnnnnnnnnnnnnnnnnnnnnnnnnnnnnnnnnnnnnnnnnnnnnnnnnnnnnnnnnnnnnnnnnnnnnnnnnnnnnnnnnnnnnnnnnnnnnnnnnnnnnnnnnnnnnnnnnnnnnnnnnnnnnnnnnnnnnnnnnnnnnnnnnnnnnnnnnnnnnnnnnnnnnnnnnnnnnnnnnnnnnnnnnnnnnnnnnnnnnnnnnnnnnnnnnnnnnnnnnnnnnnnnnnnnnnnnnnnnnnnnnnnnnnnnnnnnnnnnnnnnnnnnnnnnnnnnnnnnnnnnnnnnnnnnnnnnnnnnnnnnnnnnnnnnnnnnnnnnnnnnnnnnnnnnnnnnnnnnnnnnnnnnnnnnnnnnnnnnnnnnnnnnnnnnnnnnnnnnnnnnnnnnnnnnnnnnnnnnnnnnnnnnnnnnnnnnnnnnnnnnnnnnnnnnnnnnnnnnnnnnnnnnnnnnnnnnnnnnnnnnnnnnnnnnnnnnnnnnnnnnnnnnnnnnnnnnnnnnnnnnnnnnnnnnnnnnnnnnnnnnnnnnnnnnnnnnnnnnnnnnnnnnnnnnnnnnnnnnnnnnnnnnnnnnnnnnnnnnnnnnnnnnnnnnnnnnnnnnnnnnnnnnnnnnnnnnnnnnnnnnnnnnnnnnnnnnnnnnnnnnnnnnnnnnnnnnnnnnnnnnnnnnnnnnnnnnnnnnnnnnnnnnnnnnnnnnnnnnnnnnnnnnnnnnnnnnnnnnnnnnnnnnnnnnnnnnnnnnnnnnnnnnnnnnnnnnnnnnnnnnnnnnnnnnnnnnnnnnnnnnnnnnnnnnnnnnnnnnnnnnnnnnnnnnnnnnnnnnnnnnnnnnnnnnnnnnnnnnnnnnnnnnnnnnnnnnnnnnnnnnnnnnnnnnnnnnnnnnnnnnnnnnnnnnnnnnnnnnnnnnnnnnnnnnnnnnnnnnnnnnnnnnnnnnnnnnnnnnnnnnnnnnnnnnnnnnnnnnnnnnnnnnnnnnnnnnnnnnnnnnnnnnnnnnnnnnnnnnnnnnnnnnnnnnnnnnnnnnnnnnnnnnnnnnnnnnnnnnnnnnnnnnnnnnnnnnnnnnnnnnnnnnnnnnnnnnnnnnnnnnnnnnnnnnnnnnnnnnnnnnnnnnnnnnnnnnnnnnnnnnnnnnnnnnnnnnnnnnnnnnnnnnnnnnnnnnnnnnnnnnnnnnnnnnnnnnnnnnnnnnnnnnnnnnnnnnnnnnnnnnnnnnnnnnnnnnnnnnnnnnnnnnnnnnnnnnnnnnnnnnnnnnnnnnnnnnnnnnnnnnnnnnnnnnnnnnnnnnnnnnnnnnnnnnnnnnnnnnnnnnnnnnnnnnnnnnnnnnnnnnnnnnnnnnnnnnnnnnnnnnnnnnnnnnnnnnnnnnnnnnnnnnnnnnnnnnnnnnnnnnnnnnnnnnnnnnnnnnnnnnnnnnnnnnnnnnnnnnnnnnnnnnnnnnnnnnnnnnnnnnnnnnnnnnnnnnnnnnnnnnnnnnnnnnnnnnnnnnnnnnnnnnnnnnnnnnnnnnnnnnnnnnnnnnnnnnnnnnnnnnnnnnnnnnnnnnnnnnnnnnnnnnnnnnnnnnnnnnnnnnnnnnnnnnnnnnnnnnnnnnnnnnnnnnnnnnnnnnnnnnnnnnnnnnnnnnnnnnnnnnnnnnnnnnnnnnnnnnnnnnnnnnnnnnnnnnnnnnnnnnnnnnnnnnnnnnnnnnnnnnnnnnnnnnnnnnnnnnnnnnnnnnnnnnnnnnnnnnnnnnnnnnnnnnnnnnnnnnnnnnnnnnnnnnnnnnnnnnnnnnnnnnnnnnnnnnnnnnnnnnnnnnnnnnnnnnnnnnnnnnnnnnnnnnnnnnnnnnnnnnnnnnnnnnnnnnnnnnnnnnnnnnnnnnnnnnnnnnnnnnnnnnnnnnnnnnnnnnnnnnnnnnnnnnnnnnnnnnnnnnnnnnnnnnnnnnnnnnnnnnnnnnnnnnnnnnnnnnnnnnnnnnnnnnnnnnnnnnnnnnnnnnnnnnnnnnnnnnnnnnnnnnnnnnnnnnnnnnnnnnnnnnnnnnnnnnnnnnnnnnnnnnnnnnnnnnnnnnnnnnnnnnnnnnnnnnnnnnnnnnnnnnnnnnnnnnnnnnnnnnnnnnnnnnnnnnnnnnnnnnnnnnnnnnnnnnnnnnnnnnnnnnnnnnnnnnnnnnnnnnnnnnnnnnnnnnnnnnnnnnnnnnnnnnnnnnnnnnnnnnnnnnnnnnnnnnnnnnnnnnnnnnnnnnnnnnnnnnnnnnnnnnnnnnnnnnnnnnnnnnnnnnnnnnnnnnnnnnnnnnnnnnnnnnnnnnnnnnnnnnnnnnnnnnnnnnnnnnnnnnnnnnnnnnnnnnnnnnnnnnnnnnnnnnnnnnnnnnnnnnnnnnnnnnnnnnnnnnnnnnnnnnnnnnnnnnnnnnnnnnnnnnnnnnnnnnnnnnnnnnnnnnnnnnnnnnnnnnnnnnnnnnnnnnnnnnnnnnnnnnnnnnnnnnnnnnnnnnnnnnnnnnnnnnnnnnnnnnnnnnnnnnnnnnnnnnnnnnnnnnnnnnnnnnnnnnnnnnnnnnnnnnnnnnnnnnnnnnnnnnnnnnnnnnnnnnnnnnnnnnnnnnnnnnnnnnnnnnnnnnnnnnnnnnnnnnnnnnnnnnnnnnnnnnnnnnnnnnnnnnnnnnnnnnnnnnnnnnnnnnnnnnnnnnnnnnnnnnnnnnnnnnnnnnnnnnnnnnnnnnnnnnnnnnnnnnnnnnnnnnnnnnnnnnnnnnnnnnnnnnnnnnnnnnnnnnnnnnnnnnnnnnnnnnnnnnnnnnnnnnnnnnnnnnnnnnnnnnnnnnnnnnnnnnnnnnnnnnnnnnnnnnnnnnnnnnnnnnnnnnnnnnnnnnnnnnnnnnnnnnnnnnnnnnnnnnnnnnnnnnnnnnnnnnnnnnnnnnnnnnnnnnnnnnnnnnnnnnnnnnnnnnnnnnnnnnnnnnnnnnnnnnnnnnnnnnnnnnnnnnnnnnnnnnnnnnnnnnnnnnnnnnnnnnnnnnnnnnnnnnnnnnnnnnnnnnnnnnnnnnnnnnnnnnnnnnnnnnnnnnnnnnnnnnnnnnnnnnnnnnnnnnnnnnnnnnnnnnnnnnnnnnnnnnnnnnnnnnnnnnnnnnnnnnnnnnnnnnnnnnnnnnnnnnnnnnnnnnnnnnnnnnnnnnnnnnnnnnnnnnnnnnnnnnnnnnnnnnnnnnnnnnnnnnnnnnnnnnnnnnnnnnnnnnnnnnnnnnnnnnnnnnnnnnnnnnnnnnnnnnnnnnnnnnnnnnnnnnnnnnnnnnnnnnnnnnnnnnnnnnnnnnnnnnnnnnnnnnnnnnnnnnnnnnnnnnnnnnnnnnnnnnnnnnnnnnnnnnnnnnnnnnnnnnnnnnnnnnnnnnnnnnnnnnnnnnnnnnnnnnnnnnnnnnnnnnnnnnnnnnnnnnnnnnnnnnnnnnnnnnnnnnnnnnnnnnnnnnnnnnnnnnnnnnnnnnnnnnnnnnnnnnnnnnnnnnnnnnnnnnnnnnnnnnnnnnnnnnnnnnnnnnnnnnnnnnnnnnnnnnnnnnnnnnnnnnnnnnnnnnnnnnnnnnnnnnnnnnnnnnnnnnnnnnnnnnnnnnnnnnnnnnnnnnnnnnnnnnnnnnnnnnnnnnnnnnnnnnnnnnnnnnnnnnnnnnnnnnnnnnnnnnnnnnnnnnnnnnnnnnnnnnnnnnnnnnnnnnnnnnnnnnnnnnnnnnnnnnnnnnnnnnnnnnnnnnnnnnnnnnnnnnnnnnnnnnnnnnnnnnnnnnnnnnnnnnnnnnnnnnnnnnnnnnnnnnnnnnnnnnnnnnnnnnnnnnnnnnnnnnnnnnnnnnnnnnnnnnnnnnnnnnnnnnnnnnnnnnnnnnnnnnnnnnnnnnnnnnnnnnnnnnnnnnnnnnnnnnnnnnnnnnnnnnnnnnnnnnnnnnnnnnnnnnnnnnnnnnnnnnnnnnnnnnnnnnnnnnnnnnnnnnnnnnnnnnnnnnnnnnnnnnnnnnnnnnnnnnnnnnnnnnnnnnnnnnnnnnnnnnnnnnnnnnnnnnnnnnnnnnnnnnnnnnnnnnnnnnnnnnnnnnnnnnnnnnnnnnnnnnnnnnnnnnnnnnnnnnnnnnnnnnnnnnnnnnnnnnnnnnnnnnnnnnnnnnnnnnnnnnnnnnnnnnnnnnnnnnnnnnnnnnnnnnnnnnnnnnnnnnnnnnnnnnnnnnnnnnnnnnnnnnnnnnnnnnnnnnnnnnnnnnnnnnnnnnnnnnnnnnnnnnnnnnnnnnnnnnnnnnnnnnnnnnnnnnnnnnnnnnnnnnnnnnnnnnnnnnnnnnnnnnnnnnnnnnnnnnnnnnnnnnnnnnnnnnnnnnnnnnnnnnnnnnnnnnnnnnnnnnnnnnnnnnnnnnnnnnnnnnnnnnnnnnnnnnnnnnnnnnnnnnnnnnnnnnnnnnnnnnnnnnnnnnnnnnnnnnnnnnnnnnnnnnnnnnnnnnnnnnnnnnnnnnnnnnnnnnnnnnnnnnnnnnnnnnnnnnnnnnnnnnnnnnnnnnnnnnnnnnnnnnnnnnnnnnnnnnnnnnnnnnnnnnnnnnnnnnnnnnnnnnnnnnnnnnnnnnnnnnnnnnnnnnnnnnnnnnnnnnnnnnnnnnnnnnnnnnnnnnnnnnnnnnnnnnnnnnnnnnnnnnnnnnnnnnnnnnnnnnnnnnnnnnnnnnnnnnnnnnnnnnnnnnnnnnnnnnnnnnnnnnnnnnnnnnnnnnnnnnnnnnnnnnnnnnnnnnnnnnnnnnnnnnnnnnnnnnnnnnnnnnnnnnnnnnnnnnnnnnnnnnnnnnnnnnnnnnnnnnnnnnnnnnnnnnnnnnnnnnnnnnnnnnnnnnnnnnnnnnnnnnnnnnnnnnnnnnnnnnnnnnnnnnnnnnnnnnnnnnnnnnnnnnnnnnnnnnnnnnnnnnnnnnnnnnnnnnnnnnnnnnnnnnnnnnnnnnnnnnnnnnnnnnnnnnnnnnnnnnnnnnnnnnnnnnnnnnnnnnnnnnnnnnnnnnnnnnnnnnnnnnnnnnnnnnnnnnnnnnnnnnnnnnnnnnnnnnnnnnnnnnnnnnnnnnnnnnnnnnnnnnnnnnnnnnnnnnnnnnnnnnnnnnnnnnnnnnnnnnnnnnnnnnnnnnnnnnnnnnnnnnnnnnnnnnnnnnnnnnnnnnnnnnnnnnnnnnnnnnnnnnnnnnnnnnnnnnnnnnnnnnnnnnnnnnnnnnnnnnnnnnnnnnnnnnnnnnnnnnnnnnnnnnnnnnnnnnnnnnnnnnnnnnnnnnnnnnnnnnnnnnnnnnnnnnnnnnnnnnnnnnnnnnnnnnnnnnnnnnnnnnnnnnnnnnnnnnnnnnnnnnnnnnnnnnnnnnnnnnnnnnnnnnnnnnnnnnnnnnnnnnnnnnnnnnnnnnnnnnnnnnnnnnnnnnnnnnnnnnnnnnnnnnnnnnnnnnnnnnnnnnnnnnnnnnnnnnnnnnnnnnnnnnnnnnnnnnnnnnnnnnnnnnnnnnnnnnnnnnnnnnnnnnnnnnnnnnnnnnnnnnnnnnnnnnnnnnnnnnnnnnnnnnnnnnnnnnnnnnnnnnnnnnnnnnnnnnnnnnnnnnnnnnnnnnnnnnnnnnnnnnnnnnnnnnnnnnnnnnnnnnnnnnnnnnnnnnnnnnnnnnnnnnnnnnnnnnnnnnnnnnnnnnnnnnnnnnnnnnnnnnnnnnnnnnnnnnnnnnnnnnnnnnnnnnnnnnnnnnnnnnnnnnnnnnnnnnnnnnnnnnnnnnnnnnnnnnnnnnnnnnnnnnnnnnnnnnnnnnnnnnnnnnnnnnnnnnnnnnnnnnnnnnnnnnnnnnnnnnnnnnnnnnnnnnnnnnnnnnnnnnnnnnnnnnnnnnnnnnnnnnnnnnnnnnnnnnnnnnnnnnnnnnnnnnnnnnnnnnnnnnnnnnnnnnnnnnnnnnnnnnnnnnnnnnnnnnnnnnnnnnnnnnnnnnnnnnnnnnnnnnnnnnnnnnnnnnnnnnnnnnnnnnnnnnnnnnnnnnnnnnnnnnnnnnnnnnnnnnnnnnnnnnnnnnnnnnnnnnnnnnnnnnnnnnnnnnnnnnnnnnnnnnnnnnnnnnnnnnnnnnnnnnnnnnnnnnnnnnnnnnnnnnnnnnnnnnnnnnnnnnnnnnnnnnnnnnnnnnnnnnnnnnnnnnnnnnnnnnnnnnnnnnnnnnnnnnnnnnnnnnnnnnnnnnnnnnnnnnnnnnnnnnnnnnnnnnnnnnnnnnnnnnnnnnnnnnnnnnnnnnnnnnnnnnnnnnnnnnnnnnnnnnnnnnnnnnnnnnnnnnnnnnnnnnnnnnnnnnnnnnnnnnnnnnnnnnnnnnnnnnnnnnnnnnnnnnnnnnnnnnnnnnnnnnnnnnnnnnnnnnnnnnnnnnnnnnnnnnnnnnnnnnnnnnnnnnnnnnnnnnnnnnnnnnnnnnnnnnnnnnnnnnnnnnnnnnnnnnnnnnnnnnnnnnnnnnnnnnnnnnnnnnnnnnnnnnnnnnnnnnnnnnnnnnnnnnnnnnnnnnnnnnnnnnnnnnnnnnnnnnnnnnnnnnnnnnnnnnnnnnnnnnnnnnnnnnnnnnnnnnnnnnnnnnnnnnnnnnnnnnnnnnnnnnnnnnnnnnnnnnnnnnnnnnnnnnnnnnnnnnnnnnnnnnnnnnnnnnnnnnnnnnnnnnnnnnnnnnnnnnnnnnnnnnnnnnnnnnnnnnnnnnnnnnnnnnnnnnnnnnnnnnnnnnnnnnnnnnnnnnnnnnnnnnnnnnnnnnnnnnnnnnnnnnnnnnnnnnnnnnnnnnnnnnnnnnnnnnnnnnnnnnnnnnnnnnnnnnnnnnnnnnnnnnnnnnnnnnnnnnnnnnnnnnnnnnnnnnnnnnnnnnnnnnnnnnnnnnnnnnnnnnnnnnnnnnnnnnnnnnnnnnnnnnnnnnnnnnnnnnnnnnnnnnnnnnnnnnnnnnnnnnnnnnnnnnnnnnnnnnnnnnnnnnnnnnnnnnnnnnnnnnnnnnnnnnnnnnnnnnnnnnnnnnnnnnnnnnnnnnnnnnnnnnnnnnnnnnnnnnnnnnnnnnnnnnnnnnnnnnnnnnnnnnnnnnnnnnnnnnnnnnnnnnnnnnnnnnnnnnnnnnnnnnnnnnnnnnnnnnnnnnnnnnnnnnnnnnnnnnnnnnnnnnnnnnnnnnnnnnnnnnnnnnnnnnnnnnnnnnnnnnnnnnnnnnnnnnnnnnnnnnnnnnnnnnnnnnnnnnnnnnnnnnnnnnnnnnnnnnnnnnnnnnnnnnnnnnnnnnnnnnnnnnnnnnnnnnnnnnnnnnnnnnnnnnnnnnnnnnnnnnnnnnnnnnnnnnnnnnnnnnnnnnnnnnnnnnnnnnnnnnnnnnnnnnnnnnnnnnnnnnnnnnnnnnnnnnnnnnnnnnnnnnnnnnnnnnnnnnnnnnnnnnnnnnnnnnnnnnnnnnnnnnnnnnnnnnnnnnnnnnnnnnnnnnnnnnnnnnnnnnnnnnnnnnnnnnnnnnnnnnnnnnnnnnnnnnnnnnnnnnnnnnnnnnnnnnnnnnnnnnnnnnnnnnnnnnnnnnnnnnnnnnnnnnnnnnnnnnnnnnnnnnnnnnnnnnnnnnnnnnnnnnnnnnnnnnnnnnnnnnnnnnnnnnnnnnnnnnnnnnnnnnnnnnnnnnnnnnnnnnnnnnnnnnnnnnnnnnnnnnnnnnnnnnnnnnnnnnnnnnnnnnnnnnnnnnnnnnnnnnnnnnnnnnnnnnnnnnnnnnnnnnnnnnnnnnnnnnnnnnnnnnnnnnnnnnnnnnnnnnnnnnnnnnnnnnnnnnnnnnnnnnnnnnnnnnnnnnnnnnnnnnnnnnnnnnnnnnnnnnnnnnnnnnnnnnnnnnnnnnnnnnnnnnnnnnnnnnnnnnnnnnnnnnnnnnnnnnnnnnnnnnnnnnnnnnnnnnnnnnnnnnnnnnnnnnnnnnnnnnnnnnnnnnnnnnnnnnnnnnnnnnnnnnnnnnnnnnnnnnnnnnnnnnnnnnnnnnnnnnnnnnnnnnnnnnnnnnnnnnnnnnnnnnnnnnnnnnnnnnnnnnnnnnnnnnnnnnnnnnnnnnnnnnnnnnnnnnnnnnnnnnnnnnnnnnnnnnnnnnnnnnnnnnnnnnnnnnnnnnnnnnnnnnnnnnnnnnnnnnnnnnnnnnnnnnnnnnnnnnnnnnnnnnnnnnnnnnnnnnnnnnnnnnnnnnnnnnnnnnnnnnnnnnnnnnnnnnnnnnnnnnnnnnnnnnnnnnnnnnnnnnnnnnnnnnnnnnnnnnnnnnnnnnnnnnnnnnnnnnnnnnnnnnnnnnnnnnnnnnnnnnnnnnnnnnnnnnnnnnnnnnnnnnnnnnnnnnnnnnnnnnnnnnnnnnnnnnnnnnnnnnnnnnnnnnnnnnnnnnnnnnnnnnnnnnnnnnnnnnnnnnnnnnnnnnnnnnnnnnnnnnnnnnnnnnnnnnnnnnnnnnnnnnnnnnnnnnnnnnnnnnnnnnnnnnnnnnnnnnnnnnnnnnnnnnnnnnnnnnnnnnnnnnnnnnnnnnnnnnnnnnnnnnnnnnnnnnnnnnnnnnnnnnnnnnnnnnnnnnnnnnnnnnnnnnnnnnnnnnnnnnnnnnnnnnnnnnnnnnnnnnnnnnnnnnnnnnnnnnnnnnnnnnnnnnnnnnnnnnnnnnnnnnnnnnnnnnnnnnnnnnnnnnnnnnnnnnnnnnnnnnnnnnnnnnnnnnnnnnnnnnnnnnnnnnnnnnnnnnnnnnnnnnnnnnnnnnnnnnnnnnnnnnnnnnnnnnnnnnnnnnnnnnnnnnnnnnnnnnnnnnnnnnnnnnnnnnnnnnnnnnnnnnnnnnnnnnnnnnnnnnnnnnnnnnnnnnnnnnnnnnnnnnnnnnnnnnnnnnnnnnnnnnnnnnnnnnnnnnnnnnnnnnnnnnnnnnnnnnnnnnnnnnnnnnnnnnnnnnnnnnnnnnnnnnnnnnnnnnnnnnnnnnnnnnnnnnnnnnnnnnnnnnnnnnnnnnnnnnnnnnnnnnnnnnnnnnnnnnnnnnnnnnnnnnnnnnnnnnnnnnnnnnnnnnnnnnnnnnnnnnnnnnnnnnnnnnnnnnnnnnnnnnnnnnnnnnnnnnnnnnnnnnnnnnnnnnnnnnnnnnnnnnnnnnnnnnnnnnnnnnnnnnnnnnnnnnnnnnnnnnnnnnnnnnnnnnnnnnnnnnnnnnnnnnnnnnnnnnnnnnnnnnnnnnnnnnnnnnnnnnnnnnnnnnnnnnnnnnnnnnnnnnnnnnnnnnnnnnnnnnnnnnnnnnnnnnnnnnnnnnnnnnnnnnnnnnnnnnnnnnnnnnnnnnnnnnnnnnnnnnnnnnnnnnnnnnnnnnnnnnnnnnnnnnnnnnnnnnnnnnnnnnnnnnnnnnnnnnnnnnnnnnnnnnnnnnnnnnnnnnnnnnnnnnnnnnnnnnnnnnnnnnnnnnnnnnnnnnnnnnnnnnnnnnnnnnnnnnnnnnnnnnnnnnnnnnnnnnnnnnnnnnnnnnnnnnnnnnnnnnnnnnnnnnnnnnnnnnnnnnnnnnnnnnnnnnnnnnnnnnnnnnnnnnnnnnnnnnnnnnnnnnnnnnnnnnnnnnnnnnnnnnnnnnnnnnnnnnnnnnnnnnnnnnnnnnnnnnnnnnnnnnnnnnnnnnnnnnnnnnnnnnnnnnnnnnnnnnnnnnnnnnnnnnnnnnnnnnnnnnnnnnnnnnnnnnnnnnnnnnnnnnnnnnnnnnnnnnnnnnnnnnnnnnnnnnnnnnnnnnnnnnnnnnnnnnnnnnnnnnnnnnnnnnnnnnnnnnnnnnnnnnnnnnnnnnnnnnnnnnnnnnnnnnnnnnnnnnnnnnnnnnnnnnnnnnnnnnnnnnnnnnnnnnnnnnnnnnnnnnnnnnnnnnnnnnnnnnnnnnnnnnnnnnnnnnnnnnnnnnnnnnnnnnnnnnnnnnnnnnnnnnnnnnnnnnnnnnnnnnnnnnnnnnnnnnnnnnnnnnnnnnnnnnnnnnnnnnnnnnnnnnnnnnnnnnnnnnnnnnnnnnnnnnnnnnnnnnnnnnnnnnnnnnnnnnnnnnnnnnnnnnnnnnnnnnnnnnnnnnnnnnnnnnnnnnnnnnnnnnnnnnnnnnnnnnnnnnnnnnnnnnnnnnnnnnnnnnnnnnnnnnnnnnnnnnnnnnnnnnnnnnnnnnnnnnnnnnnnnnnnnnnnnnnnnnnnnnnnnnnnnnnnnnnnnnnnnnnnnnnnnnnnnnnnnnnnnnnnnnnnnnnnnnnnnnnnnnnnnnnnnnnnnnnnnnnnnnnnnnnnnnnnnnnnnnnnnnnnnnnnnnnnnnnnnnnnnnnnnnnnnnnnnnnnnnnnnnnnnnnnnnnnnnnnnnnnnnnnnnnnnnnnnnnnnnnnnnnnnnnnnnnnnnnnnnnnnnnnnnnnnnnnnnnnnnnnnnnnnnnnnnnnnnnnnnnnnnnnnnnnnnnnnnnnnnnnnnnnnnnnnnnnnnnnnnnnnnnnnnnnnnnnnnnnnnnnnnnnnnnnnnnnnnnnnnnnnnnnnnnnnnnnnnnnnnnnnnnnnnnnnnnnnnnnnnnnnnnnnnnnnnnnnnnnnnnnnnnnnnnnnnnnnnnnnnnnnnnnnnnnnnnnnnnnnnnnnnnnnnnnnnnnnnnnnnnnnnnnnnnnnnnnnnnnnnnnnnnnnnnnnnnnnnnnnnnnnnnnnnnnnnnnnnnnnnnnnnnnnnnnnnnnnnnnnnnnnnnnnnnnnnnnnnnnnnnnnnnnnnnnnnnnnnnnnnnnnnnnnnnnnnnnnnnnnnnnnnnnnnnnnnnnnnnnnnnnnnnnnnnnnnnnnnnnnnnnnnnnnnnnnnnnnnnnnnnnnnnnnnnnnnnnnnnnnnnnnnnnnnnnnnnnnnnnnnnnnnnnnnnnnnnnnnnnnnnnnnnnnnnnnnnnnnnnnnnnnnnnnnnnnnnnnnnnnnnnnnnnnnnnnnnnnnnnnnnnnnnnnnnnnnnnnnnnnnnnnnnnnnnnnnnnnnnnnnnnnnnnnnnnnnnnnnnnnnnnnnnnnnnnnnnnnnnnnnnnnnnnnnnnnnnnnnnnnnnnnnnnnnnnnnnnnnnnnnnnnnnnnnnnnnnnnnnnnnnnnnnnnnnnnnnnnnnnnnnnnnnnnnnnnnnnnnnnnnnnnnnnnnnnnnnnnnnnnnnnnnnnnnnnnnnnnnnnnnnnnnnnnnnnnnnnnnnnnnnnnnnnnnnnnnnnnnnnnnnnnnnnnnnnnnnnnnnnnnnnnnnnnnnnnnnnnnnnnnnnnnnnnnnnnnnnnnnnnnnnnnnnnnnnnnnnnnnnnnnnnnnnnnnnnnnnnnnnnnnnnnnnnnnnnnnnnnnnnnnnnnnnnnnnnnnnnnnnnnnnnnnnnnnnnnnnnnnnnnnnnnnnnnnnnnnnnnnnnnnnnnnnnnnnnnnnnnnnnnnnnnnnnnnnnnnnnnnnnnnnnnnnnnnnnnnnnnnnnnnnnnnnnnnnnnnnnnnnnnnnnnnnnnnnnnnnnnnnnnnnnnnnnnnnnnnnnnnnnnnnnnnnnnnnnnnnnnnnnnnnnnnnnnnnnnnnnnnnnnnnnnnnnnnnnnnnnnnnnnnnnnnnnnnnnnnnnnnnnnnnnnnnnnnnnnnnnnnnnnnnnnnnnnnnnnnnnnnnnnnnnnnnnnnnnnnnnnnnnnnnnnnnnnnnnnnnnnnnnnnnnnnnnnnnnnnnnnnnnnnnnnnnnnnnnnnnnnnnnnnnnnnnnnnnnnnnnnnnnnnnnnnnnnnnnnnnnnnnnnnnnnnnnnnnnnnnnnnnnnnnnnnnnnnnnnnnnnnnnnnnnnnnnnnnnnnnnnnnnnnnnnnnnnnnnnnnnnnnnnnnnnnnnnnnnnnnnnnnnnnnnnnnnnnnnnnnnnnnnnnnnnnnnnnnnnnnnnnnnnnnnnnnnnnnnnnnnnnnnnnnnnnnnnnnnnnnnnnnnnnnnnnnnnnnnnnnnnnnnnnnnnnnnnnnnnnnnnnnnnnnnnnnnnnnnnnnnnnnnnnnnnnnnnnnnnnnnnnnnnnnnnnnnnnnnnnnnnnnnnnnnnnnnnnnnnnnnnnnnnnnnnnnnnnnnnnnnnnnnnnnnnnnnnnnnnnnnnnnnnnnnnnnnnnnnnnnnnnnnnnnnnnnnnnnnnnnnnnnnnnnnnnnnnnnnnnnnnnnnnnnnnnnnnnnnnnnnnnnnnnnnnnnnnnnnnnnnnnnnnnnnnnnnnnnnnnnnnnnnnnnnnnnnnnnnnnnnnnnnnnnnnnnnnnnnnnnnnnnnnnnnnnnnnnnnnnnnnnnnnnnnnnnnnnnnnnnnnnnnnnnnnnnnnnnnnnnnnnnnnnnnnnnnnnnnnnnnnnnnnnnnnnnnnnnnnnnnnnnnnnnnnnnnnnnnnnnnnnnnnnnnnnnnnnnnnnnnnnnnnnnnnnnnnnnnnnnnnnnnnnnnnnnnnnnnnnnnnnnnnnnnnnnnnnnnnnnnnnnnnnnnnnnnnnnnnnnnnnnnnnnnnnnnnnnnnnnnnnnnnnnnnnnnnnnnnnnnnnnnnnnnnnnnnnnnnnnnnnnnnnnnnnnnnnnnnnnnnnnnnnnnnnnnnnnnnnnnnnnnnnnnnnnnnnnnnnnnnnnnnnnnnnnnnnnnnnnnnnnnnnnnnnnnnnnnnnnnnnnnnnnnnnnnnnnnnnnnnnnnnnnnnnnnnnnnnnnnnnnnnnnnnnnnnnnnnnnnnnnnnnnnnnnnnnnnnnnnnnnnnnnnnnnnnnnnnnnnnnnnnnnnnnnnnnnnnnnnnnnnnnnnnnnnnnnnnnnnnnnnnnnnnnnnnnnnnnnnnnnnnnnnnnnnnnnnnnnnnnnnnnnnnnnnnnnnnnnnnnnnnnnnnnnnnnnnnnnnnnnnnnnnnnnnnnnnnnnnnnnnnnnnnnnnnnnnnnnnnnnnnnnnnnnnnnnnnnnnnnnnnnnnnnnnnnnnnnnnnnnnnnnnnnnnnnnnnnnnnnnnnnnnnnnnnnnnnnnnnnnnnnnnnnnnnnnnnnnnnnnnnnnnnnnnnnnnnnnnnnnnnnnnnnnnnnnnnnnnnnnnnnnnnnnnnnnnnnnnnnnnnnnnnnnnnnnnnnnnnnnnnnnnnnnnnnnnnnnnnnnnnnnnnnnnnnnnnnnnnnnnnnnnnnnnnnnnnnnnnnnnnnnnnnnnnnnnnnnnnnnnnnnnnnnnnnnnnnnnnnnnnnnnnnnnnnnnnnnnnnnnnnnnnnnnnnnnnnnnnnnnnnnnnnnnnnnnnnnnnnnnnnnnnnnnnnnnnnnnnnnnnnnnnnnnnnnnnnnnnnnnnnnnnnnnnnnnnnnnnnnnnnnnnnnnnnnnnnnnnnnnnnnnnnnnnnnnnnnnnnnnnnnnnnnnnnnnnnnnnnnnnnnnnnnnnnnnnnnnnnnnnnnnnnnnnnnnnnnnnnnnnnnnnnnnnnnnnnnnnnnnnnnnnnnnnnnnnnnnnnnnnnnnnnnnnnnnnnnnnnnnnnnnnnnnnnnnnnnnnnnnnnnnnnnnnnnnnnnnnnnnnnnnnnnnnnnnnnnnnnnnnnnnnnnnnnnnnnnnnnnnnnnnnnnnnnnnnnnnnnnnnnnnnnnnnnnnnnnnnnnnnnnnnnnnnnnnnnnnnnnnnnnnnnnnnnnnnnnnnnnnnnnnnnnnnnnnnnnnnnnnnnnnnnnnnnnnnnnnnnnnnnnnnnnnnnnnnnnnnnnnnnnnnnnnnnnnnnnnnnnnnnnnnnnnnnnnnnnnnnnnnnnnnnnnnnnnnnnnnnnnnnnnnnnnnnnnnnnnnnnnnnnnnnnnnnnnnnnnnnnnnnnnnnnnnnnnnnnnnnnnnnnnnnnnnnnnnnnnnnnnnnnnnnnnnnnnnnnnnnnnnnnnnnnnnnnnnnnnnnnnnnnnnnnnnnnnnnnnnnnnnnnnnnnnnnnnnnnnnnnnnnnnnnnnnnnnnnnnnnnnnnnnnnnnnnnnnnnnnnnnnnnnnnnnnnnnnnnnnnnnnnnnnnnnnnnnnnnnnnnnnnnnnnnnnnnnnnnnnnnnnnnnnnnnnnnnnnnnnnnnnnnnnnnnnnnnnnnnnnnnnnnnnnnnnnnnnnnnnnnnnnnnnnnnnnnnnnnnnnnnnnnnnnnnnnnnnnnnnnnnnnnnnnnnnnnnnnnnnnnnnnnnnnnnnnnnnnnnnnnnnnnnnnnnnnnnnnnnnnnnnnnnnnnnnnnnnnnnnnnnnnnnnnnnnnnnnnnnnnnnnnnnnnnnnnnnnnnnnnnnnnnnnnnnnnnnnnnnnnnnnnnnnnnnnnnnnnnnnnnnnnnnnnnnnnnnnnnnnnnnnnnnnnnnnnnnnnnnnnnnnnnnnnnnnnnnnnnnnnnnnnnnnnnnnnnnnnnnnnnnnnnnnnnnnnnnnnnnnnnnnnnnnnnnnnnnnnnnnnnnnnnnnnnnnnnnnnnnnnnnnnnnnnnnnnnnnnnnnnnnnnnnnnnnnnnnnnnnnnnnnnnnnnnnnnnnnnnnnnnnnnnnnnnnnnnnnnnnnnnnnnnnnnnnnnnnnnnnnnnnnnnnnnnnnnnnnnnnnnnnnnnnnnnnnnnnnnnnnnnnnnnnnnnnnnnnnnnnnnnnnnnnnnnnnnnnnnnnnnnnnnnnnnnnnnnnnnnnnnnnnnnnnnnnnnnnnnnnnnnnnnnnnnnnnnnnnnnnnnnnnnnnnnnnnnnnnnnnnnnnnnnnnnnnnnnnnnnnnnnnnnnnnnnnnnnnnnnnnnnnnnnnnnnnnnnnnnnnnnnnnnnnnnnnnnnnnnnnnnnnnnnnnnnnnnnnnnnnnnnnnnnnnnnnnnnnnnnnnnnnnnnnnnnnnnnnnnnnnnnnnnnnnnnnnnnnnnnnnnnnnnnnnnnnnnnnnnnnnnnnnnnnnnnnnnnnnnnnnnnnnnnnnnnnnnnnnnnnnnnnnnnnnnnnnnnnnnnnnnnnnnnnnnnnnnnnnnnnnnnnnnnnnnnnnnnnnnnnnnnnnnnnnnnnnnnnnnnnnnnnnnnnnnnnnnnnnnnnnnnnnnnnnnnnnnnnnnnnnnnnnnnnnnnnnnnnnnnnnnnnnnnnnnnnnnnnnnnnnnnnnnnnnnnnnnnnnnnnnnnnnnnnnnnnnnnnnnnnnnnnnnnnnnnnnnnnnnnnnnnnnnnnnnnnnnnnnnnnnnnnnnnnnnnnnnnnnnnnnnnnnnnnnnnnnnnnnnnnnnnnnnnnnnnnnnnnnnnnnnnnnnnnnnnnnnnnnnnnnnnnnnnnnnnnnnnnnnnnnnnnnnnnnnnnnnnnnnnnnnnnnnnnnnnnnnnnnnnnnnnnnnnnnnnnnnnnnnnnnnnnnnnnnnnnnnnnnnnnnnnnnnnnnnnnnnnnnnnnnnnnnnnnnnnnnnnnnnnnnnnnnnnnnnnnnnnnnnnnnnnnnnnnnnnnnnnnnnnnnnnnnnnnnnnnnnnnnnnnnnnnnnnnnnnnnnnnnnnnnnnnnnnnnnnnnnnnnnnnnnnnnnnnnnnnnnnnnnnnnnnnnnnnnnnnnnnnnnnnnnnnnnnnnnnnnnnnnnnnnnnnnnnnnnnnnnnnnnnnnnnnnnnnnnnnnnnnnnnnnnnnnnnnnnnnnnnnnnnnnnnnnnnnnnnnnnnnnnnnnnnnnnnnnnnnnnnnnnnnnnnnnnnnnnnnnnnnnnnnnnnnnnnnnnnnnnnnnnnnnnnnnnnnnnnnnnnnnnnnnnnnnnnnnnnnnnnnnnnnnnnnnnnnnnnnnnnnnnnnnnnnnnnnnnnnnnnnnnnnnnnnnnnnnnnnnnnnnnnnnnnnnnnnnnnnnnnnnnnnnnnnnnnnnnnnnnnnnnnnnnnnnnnnnnnnnnnnnnnnnnnnnnnnnnnnnnnnnnnnnnnnnnnnnnnnnnnnnnnnnnnnnnnnnnnnnnnnnnnnnnnnnnnnnnnnnnnnnnnnnnnnnnnnnnnnnnnnnnnnnnnnnnnnnnnnnnnnnnnnnnnnnnnnnnnnnnnnnnnnnnnnnnnnnnnnnnnnnnnnnnnnnnnnnnnnnnnnnnnnnnnnnnnnnnnnnnnnnnnnnnnnnnnnnnnnnnnnnnnnnnnnnnnnnnnnnnnnnnnnnnnnnnnnnnnnnnnnnnnnnnnnnnnnnnnnnnnnnnnnnnnnnnnnnnnnnnnnnnnnnnnnnnnnnnnnnnnnnnnnnnnnnnnnnnnnnnnnnnnnnnnnnnnnnnnnnnnnnnnnnnnnnnnnnnnnnnnnnnnnnnnnnnnnnnnnnnnnnnnnnnnnnnnnnnnnnnnnnnnnnnnnnnnnnnnnnnnnnnnnnnnnnnnnnnnnnnnnnnnnnnnnnnnnnnnnnnnnnnnnnnnnnnnnnnnnnnnnnnnnnnnnnnnnnnnnnnnnnnnnnnnnnnnnnnnnnnnnnnnnnnnnnnnnnnnnnnnnnnnnnnnnnnnnnnnnnnnnnnnnnnnnnnnnnnnnnnnnnnnnnnnnnnnnnnnnnnnnnnnnnnnnnnnnnnnnnnnnnnnnnnnnnnnnnnnnnnnnnnnnnnnnnnnnnnnnnnnnnnnnnnnnnnnnnnnnnnnnnnnnnnnnnnnnnnnnnnnnnnnnnnnnnnnnnnnnnnnnnnnnnnnnnnnnnnnnnnnnnnnnnnnnnnnnnnnnnnnnnnnnnnnnnnnnnnnnnnnnnnnnnnnnnnnnnnnnnnnnnnnnnnnnnnnnnnnnnnnnnnnnnnnnnnnnnnnnnnnnnnnnnnnnnnnnnnnnnnnnnnnnnnnnnnnnnnnnnnnnnnnnnnnnnnnnnnnnnnnnnnnnnnnnnnnnnnnnnnnnnnnnnnnnnnnnnnnnnnnnnnnnnnnnnnnnnnnnnnnnnnnnnnnnnnnnnnnnnnnnnnnnnnnnnnnnnnnnnnnnnnnnnnnnnnnnnnnnnnnnnnnnnnnnnnnnnnnnnnnnnnnnnnnnnnnnnnnnnnnnnnnnnnnnnnnnnnnnnnnnnnnnnnnnnnnnnnnnnnnnnnnnnnnnnnnnnnnnnnnnnnnnnnnnnnnnnnnnnnnnnnnnnnnnnnnnnnnnnnnnnnnnnnnnnnnnnnnnnnnnnnnnnnnnnnnnnnnnnnnntgttcagtcgggcagggagtgggaatagacaagaccacaagcagcttggtgcctctgaaagggagaggggtggaggggagactagagaggtgggtaggaatactggattccactgaccacgtgctggatgtcatgcttagccctcctgctctgtgccaggttaggcacctggtgttttacatatattatattacattctattacagacaactccatagcaatcctttcctctccattccatttctctccactccatcccattccattccactcccttcatttccattccagtccattccattccattccattccattccactccactccattccattccactgcactccattccacttcactccactccactccactctactgcatagcactccactccattacattccactccactccactcaaatccattcaattccattccactaaactcctttcaactccactccacactattccattcccctccattccactgcactcctctccattactttccactccactccactccactccattccactccattcctttccattcctgtccactccattccgttccactccactccactccattccactccattccattccactacaatccattctactctactccattccagtccacagtactccattcaattgcatttcactccactccattccgtcccaatctactccattccattgtattccactccactcccctccgttaaattcctttctattgcattccattcggttcaactccattccattccactccggtccattccattccactccactccacttcattccactccattccattaaattccactccattccattaaattccactccatttcacaccactaaattctgctctactccattccactccactctttttcattccattccattccactccattccattccactcccctgcattccactccactccactccattacactccattacactccattccattaaactccatttcattccactccactccatttcaatccactccactctactccatgccattccactccattccattcaattccttgccactccattccattccgctccactccattccaatccaccacacgccattccattccactcgattccattccattacactccactccattccattaccttccattcgactcagttaagttcccctccactccattccattccactccactccattctgttccactctactcctttccactccattccacttcattccattccactactctccactccactacactccaatccactcctttcaattccactccactccactccattcctctccaatcggctccactccattccattccactccactccattccattccactacattccattcctttccattccattccattccattccactacactccattccattccactccactccactccattccatttcactcccttccactccaatccactcctttccactctactccattccattcttctccagttcagttcatttgactccattccactcctctcctctccattcctctacactccataccattcctccccactccattccgttcaatttcgctccattccattccactccactcctttctattccactccattccattccacttttttccattccactccattccattccacaccactccattccattccactgcattactctccagtccattccattacactccattccactgcactccaatctgctccactccactccattcgattccactccattctattccattccatacactccattgtattccactccactgcctccgattccattgcattcgactccattccattcccctccattccattccattccattccactccaatccactccattccaagccactccattccattcccctgctctccattcccctgaattccattcccctccactccactccactcgactccactccacttcattccattctactccattccattccattcccttccattccattccattccattccactcgatttgattccattccattccattccactccactccactccattccattccagtccattgcactgcactccactccactccattccactccactccactccattttacaccactccattccattgcactctattccactacatttgattccactccattcctttacattccactccactccactccactacacttttttcctctccactcctctccaatgcactccactctactccaatccacaccattccattccagtccaccccactttattgcagtccattccactccactccattccattccactccactccacttcactacattccattccactccactccattccattccactccactccactcagttccactccattccactgcattctactccactccactccatttcactacacttcattctattccaccccatgccactgcactccacttcattccactccactccactgtactccacccactccactccattccattccactccattactttcccctctcattcattccactctactccattccactccattccactccattccattccactccattccattccactccactccattccactgcactccactccacgccattccattccactccattccattccattacactccactccaatctattacattctattctactccgttaagttccactccactccattcctttccactccactccgttcctctccacaccactccattgcacttcattccattacactcctctcctctccactacactcctatccactcctttccattccactccactccactccattccattccactccaatccgctccactccattccattccactccactccattccattccaatacattccattcctttccattccattcaaatccattgcattaaattccattccattccatttcactccactcctctcctttcattgactccacccaactgcactccattccattccactccattccactacactccattccattccactccattccactccattccatttcactcccttccactccactcctctcctttcctctctactccattccattccnnnnnnnnnnnnnnnnnnnnnnnnnnnnnnnnnnnnnnnnnnnnnnnnnnnnnnnnnnnnnnnnnnnnnnnnnnnnnnnnnnnnnnnnnnnnnnnnnnnnnnnnnnnnnnnnnnnnnnnnnnnnnnnnnnnnnnnnnnnnnnnnnnnnnnnnnnnnnnnnnnnnnnnnnnnnnnnnnnnnnnnnnnnnnnnnnnnnnnnnnnnnnnnnnnnnnnnnnnnnnnnnnnnnnnnnnnnnnnnnnnnnnnnnnnnnnnnnnnnnnnnnnnnnnnnnnnnnnnnnnnnnnnnnnnnnnnnnnnnnnnnnnnnnnnnnnnnnnnnnnnnnnnnnnnnnnnnnnnnnnnnnnnnnnnnnnnnnnnnnnnnnnnnnnnnnnnnnnnnnnnnnnnnnnnnnnnnnnnnnnnnnnnnnnnnnnnnnnnnnnnnnnnnnnnnnnnnnnnnnnnnnnnnnnnnnnnnnnnnnnnnnnnnnnnnnnnnnnnnnnnnnnnnnnnnnnnnnnnnnnnnnnnnnnnnnnnnnnnnnnnnnnnnnnnnnnnnnnnnnnnnnnnnnnnnnnnnnnnnnnnnnnnnnnnnnnnnnnnnnnnnnnnnnnnnnnnnnnnnnnnnnnnnnnnnnnnnnnnnnnnnnngtccattacactgcactccattcgacttcattccacttcactccactcccttacactccactccattccacaccactccattcgattgcactccattccactccattcgactccactccactcgattcttttccattccactccattccactccactacactcttttcctctgcactcctctccactccactccactcttctccaatccacaccattccattccagtccactccattcctttccagtccattccactcaaattcattccattccactacactacacttgactccattccattccactccagtccactccactccattccactccaatccattccatttcactccaatcctttctattccaccccacgccactgctctccacttcattccgctccattccactccactgtactccactccactccattccattccactccattccattcctctccaatccattctactctactctattccactccataccattccactccactccactccatttgactccactacattccactccactgtactccataccactccactccactctattccattccgctccaacccattccactccattcctctctgttccatgcaactccactccattccacccaattccattccactccactccactccattccactccactccactcctctccattccactccactcctctccattccactccagtccattccattccactcaactccattttattccactccactgccgcccactccatttcattcgactccattccattcccctccattccattccattaaattttattccattccattccattccactccactactctccattccaatccactccattccactcgagttcattctattcccttccattccactccattgcattccaatccactccgttccattcccctgctctccattccactcaattccattaaactccactccacttcattccattctattccattccattccattcctctccattccaatccattccattccactcctctcaaatccatttcattccacaccaatctactccactccattccattcacttccactccactccaatccactctactcgactcctctccattccactcctccattccactctattcctttccattccactcaactccattccattccaatccactccactctcttccactccagtccattccattcctctccactccattccattccattccactccattccattccactccactccattccattccactgcattccattccactccactccattcccttccactccactcctcccactacattccactccattccattccatttcactccactccactcaattccactccattctattccattccactccattgcattccagtcctctccattgcactactgttccttccactccactccactccacacccctccattccattccaccccactgcactccactccactcgactccacctctctccactctacaacattctattcctttccactacactccactcgattccactccactccactccattccattccactccattccattccactccactccactcctttctattccactccgctccattccattccactccattctattccattgcatttcataccattccataccattcctttccttttagttccactgcactccactgcactcctttctaaaccactccattccactccactacattcgaatccattccattccactccaatccattccactaaactccattccactctattcctcaccattccattccactccactcaacttcactcctatccactccattccattccattccactccactccacaccactcctctccattccattccattccattctattccactccactccactcctttccactccactatattccactccactccactcgactcccctccactccattccactacactccacttcactccacttcactccagtcttctccattgaattccattccattccactccagtccattccattccacaccacttcattccattacaatccattcgattcctttcaatgccactccaatccattccactccactccactccattccagttcaccgcattccaatcctctccactgtactccactccattccactcaattccattcctctccattccattccatgccacacatttcagttcgattccattcctctccattccattaaattccattccattccattccactccacttcactccattcaactccactgcattccactgcactccattcaactccattcaattccattccattcnnnnnnnnnnnnnnnnnnnnnnnnnnnnnnnnnnnnnnnnnnnnnnnnnnnnnnnnnnnnnnnnnnnnnnnnnnnnnnnnnnnnnnnnnnnnnnnnnnnnccactgtactccactccactccaatccgctccactcaatgccattccactcgattccactccaatccactcgtctccagtccactccattctattcctctccaccccattctattccactccactccattccactccactcactccattccactccactccattccactccactccaatccattccattccattccactccattccactccattcccatccaatccattccactccactccattccagtccactccactcgattccactccagtccattccactgcactccattccatgaaattccattccactccattccattccatatcactccattccattccactcaattccattcccttcaattccactccacttatttcccctcctttccactccattccactccactccactccatccctatccactccactccactccattgcataccactccactccttaccactcctttcttctccattccactccgctcccctcctttcctttccaatcctctccagtcaattccattccaccccactccattcctttccactccactccactctattccactgtattaaactccactccattccattccagtccattccactaaactccactctattccactccactccattccattccactccactctactccactccattccactcatctccactccactctactccttaccactccattccactccactccactccattacattccacttcattccattccaatccactccattcctctggactccactccattcgactccactccattctgctcccatccactccattccactccactacattccattcctctccactccattccattccatgccactcctttccattacaccccactccactgcattccactcctctccattccattccaatccactccactccactccagtggagtcagaatgacagtttgggtgaagcagtatgtccatgtaaaaccacttttccaaaccttgcaaatccacagtggtgaaatgtgatgcagttatggtcaatgatattaagcataatatttttggtggggcatctggtaagaaccttaaaagagaggaaaaaagtagttaagaggcattatccattagcctttgcctttctgctttcttctgcatgaagcatggtcaaaatgttggagtcaatgcagccatcttgcaaacattcagcaaaagcacagtctaggaatgtattttaaaaagactagaaattgcctcatacttgatatcattgtgaagctattatagcattccttgattttatgttatataagaataataaacccctaatttataaaaggcaacatttttcatgttttatgtttcagcctattgtacttgtgaatagattatgtattatagatcaaatgtgatttagaaatatagccctttctccaatctatcattgatgggcatttaggttgattctgtcttttatattgggaatagtgctgcaatgaacatacgcgtgcatagaggatcaggaaagataaacaatgggtaccaggcttaatacctgggtgatgagataatctgaacaaacccccatgacacaagtttagctatgtaacaaacctgtacatgtacccctgaacttaaaaaaagagatatggtcttttcttaaagttataaaagtgttgttttctttcttcgttttcattttctttagtgtcttcagttaaatatgaggggctatcaattattttagggcacctttatgtgaaaggttatgatatattattaagtgaagaaatgtaacttaataactttagaaagagtatcatttcaattttgaaaacaaactaaaaccaaaaattagatatctagagtctattctgtgcatatttcttgaggtaacagatctgacgttttattttcttgtgtgttaaacttcatcaactatttctgtttttatgactactttgtctctagctccttgacccgaataggtagaagtaggtactcaataaatacttgttgaaagaataaaaacatgaatgtatcattattatctacatacacacacataatactctatattagggtgtaaacgatactttgggggaagttactcaatttattttagcttgcctgtcttttcatatattttaaaattgaacgaggtttatttctgtcagaataaaataaataaaagaaacttcatcattaatgataaattagaagaaactggaaaaattaggtgattctttattccatgtattattgatcttataagagaagattataatagtcacccgctttcagtttcagcactttaatttccttcatccttttaccaaaattaattttatattgattaagagttaaatgtaaataataaagcagttgaagagccaaaagataaatgagaagattttagaataaaataattttgtaagatttctgggtgtaacattaatataaaaattaaacactttctttaataaaaatctagaaaaggtggcgggtaatagtggactgtacatgcactgaagtcttatctttcactcgagtattctagaaatgacaatgaaaacataaaaacaggctgggcatagtggcttatgcctgtaatcctagcactcttgttggccaaggcaggagggttgcttgaggccaagagttcaagatccacctggccaacatagcgagaacctgtctctttttataaaaaacaaacagaaaaaaacataaatacaagtaaattaatataaaaccatgcttaaacatatttgataggaatatcattgaagcagagaatgtttttgaaaacataacattgatgagatcagattgaaaagatattctgaaacctaggaggattatgacagagtgcaactgtaggaagtggagaaggtgctctatccacagagatgacacatgtttggaggaggagatgctgtgggaccaacaacaggaaattaactggaataccgaagtagaatgctgcagtttgaaatgagcatataaagccctctccatgagacactgaaacagagaaagggaaagtagcgtctgtctccaaaaagcagcagtggtggagcttggatggctgacatgcccagaacaggtcccaagtaacatcactaagcagcctttatctctaacttcctcttactaaaaatagtgcagaatataagagaacaatagctcccactctccccctcattaattaggcatgtaattaatatattcaaaaggataagaggatagtacatccatgaaataaaccaggtgctcatgaaaaggaccagtattgagatattagtgattaaaaacataactgttaaagtataaactttaatatgtatgttaattttgtaataaagccagctagagagtaacttattaggaaaagctggatggaaaaaatgcagattaaaaaggaggaaatagaatagaaagtatgaaaaaatgttaagaagtatgaggaacagatcaagaactttctaaatcaattaaataggagagtaaagaggggaaaatgatagaatggagtggaagaagtacttaaacaagaaagaaaaatttacagaaataaaaaaaaatgagttatcaaattgaacctgtccactaagagtgtgataggaaaaacaaaaacaaagcaaataaaattgacttccagatccactaagatgaaatagggcatttttcctaagtcctcccttttacctctcaaaaatcctgaacataatacaataaacaagcataggaatactctgaaatgtggaaagaatacagtggactacttatagtcctcaagacttaaggaactccatgggtctcagttctctgggtttccttattgtcttgcatatatccaggacaggtgctacaaatattccaatgcagaacagaaaaaagcatccttctgtgtctgttaccccatgcaacaatatcaaaagttgaaattatcccagtccagggggaggggatagagagggttggacataagaagtatttgaaaagaatgtcagctgaagtagtcccaaatgtggcaaaaggcaaaaacctacagattcaagaagatgagcaaatccaaataggaaaatccaaagaaatgtatgccaagacacaacctaataaactactgaaacctaaagacaaagaaaaaaattttaaagcaaacagagggaaacaacacattacttataggggaatgccaatttaaatgacagtggattttgcctctgaaaccatatagaccaaaactattgtggcacaacatttatcaagttattagagatatgacaaacccacagccaacatcatactgaatgggcaaaagatgaagcattccccttgaaaaccagcacaagaaaaggatgtcctcattcaccacttttattcaacatagtattggaagttctggccagggcaatcaggcaagagaaaaaaataaagtgcatccaaatgagaagagaggaagtcaaactatccctgtttgcagatcacatgatcctatatctagaaaaccccatagtctcagctcaaaagcttcttaagctgataaacaacttcagcaaagtctcaggatacaaaatcaaagtgtgaaaatcactagcattcctatacaccaacagtcaagccaagagccaaatcaggaattctcattcacaattgccacaaaaagaataaaatacctaggcatacagctaactagggaggtgaaagatctctacagggagaactgcaaaccactgctcaaaaaaatcagagatgacaaagaccaatggaaaaacattccatactcatgaattcttcctagaatggattgattcttcctagaatcaatgtcattaaaatggccatactgcccaaagcaatttatagattcaatgctattcctattaaactaccattgacattcttcacagaactagaaaaaaactattttaaaattcatatggaaccaaaaaagagcccgaatagccaaggcaatcctaagtagaaagaacaatgctggaggcactatgctacccaacttaaaactatattatagggctacagtaaccaaaacagtatggtcatggtacaaaaacagatgcatagaccaatggaacagaatagagaacccagaaataagaccacacacctacaactatctaatcttcaatgaaggtgaccaaaaagaagcaatggagaaaagattccctattcaataaatggtgctgagataactggccagccatatgcagtatattgaaactggatcccttccttacaccatatacaaatattaactcaagatggattaaaagacttaaatgtaaaaccaaaaaatttaaaaaccctagaagacaacctaggcaatagcattcagtacacaggcatgggcaaaggattcataatgaaaacaccaaaagcaattgcaacaaaagcaaaaatggacaaatgggatctaattaaactgaaaagctaaattaaactaattaagctaaagtaaaaagcttctgcacagcaaaggaaactatcaacagagtaaactgacaacctatagaatgggagtaaacttttgcaaactatgcatccaacaaaggtctaatattcagcatctataaggaacttaaactaatttacaagaaaaaaaacccataaaaaagtgggcaaaatacatgaacagacacttttcaaaagaagacatacacgtgaccaacaatcacatgaaaaaacctcaacatcactgatcattagagaaatgaaaatcaaaaccacaatgagataccacctaacaccagtcagaatggttattattggttggtgggagtgtaaattccttcaaccattgtggaagacagtgtggtgattcctcaaagacctaaatacagaaataccatttgactcagcaatcctatcactgggtatataaccaaaggaatataaatcattctattgtaaacatacatgcatgcatatgttcattgcagcattattcacaaaagcaaagacatggaatcaatctaaatgctcatcaatcatagactggataaagaaaatgtgttacatatacaccatggaaagctatgcagccattaaaaagaacaagatcatgtcctttgcagggacatggatggagccggaagccattattcttaccaagccaacacaggaacagaaaacgaaatactgcatgttctcatttataagtggcagctaagtgatgagaaaacttggacacatagcaggaaacaacaaacactggggcctttcggagggtggaaggtgggaaaagggagagaatcaggaaaaataactcatgggtactaggcttagtacctgggtgatgaaataatctgtacaacaaacccccatgacacaagtttacctatgtaacaagcctgcacttgtaccactgaacttaaaataaaaggtttaaaaaaaaaaagggaagcttaactgtaaattctatatctggtgacagaatctttcaggaatgaaggaaaaataaagacattcttatacaaagtaaaatgaagaatttgttgccaacaaatctatcattaaagaatgggtaaataaagttctctcataagacaggtaataataaagacaaaggtgtctacaccttcagacagaacatcagtatagggaaaaataaaattactacaatatactatacttcctatgagtttcttacataacatttgatggttgaggcaaaaattataataccaagtaatgaggtgttcaatgtgtgtacaggaaatatttaaaataaatgtaccttaaaggtggagaggtaagagacataattgtagaaaagttctacagttcacttgaagtgctgaaatgtctatgtcagtagatgatgataagtaccttataatacctagagctaacactaaaaaaactatacaaagtgatatactcaaaatcaatggaaataaatctagcctaagtctagacaaataataaattggcaggtttaagccctgaaaaaacaataattacctcagatgtgtatgaccaaaattcaccaattttaagaaagatactgaaataaatgaaaaaaacatgctacaaaaacatattatctacaaaaactcatttcaaatacaatgacttaggtaaattaaaaggattaaaaaaaaagtaacaggatgaaaaaagatacatgcaaactttatacaaaaatcaggagtggctatattaataccagataaataaattttggagcaaagaacatgattagaggcacagaaggactcacataatgattttaaaaagttaatccaccaggaagacataataatcataaatgaatattaccaaaaattatagccgcaaaaaacacagaagaaaaatgtccagaattgaggccgggaatggtggcttatgcttataatcccagcactttgggaagccgaggcaggcggatcacctgaggtcaggagttcgagaccagcctggccaacatggtaaaaccccatctctactaaaaatataaaaaattagccaggcgtggtagcacgtgcctgtagtcccagctactcgggaggctgaagcaggagaattgcttgaacccgtggggcagaggttgcagtgagctgagatcagcccactgcactacaacctgagtgacaaagtaagactccatctcaaaacaaaaatcacaagataaaaatgtccagaattgaaagtagaaatagaaaaaatccacaattctacttaggattttaacatccaactctcaacagttgatagaagtagtacacagcaagaatacagaaaaactgaacaacactataaacaggaattctccaaactcttgggaaatcataaaacacacttctacataatccatgggacaaacaggaggtctcaaagaaagtaaaaatacgtttgaaccgaataaaaaataaaatagactctaccaaagtatgtgggctacagctaaagaggtaattagaagaaaatttatagcactaaacacttattataaaaaagaaatattccaataatctaagatcctatctcaaaactagaaaaaaagagcaaaataacccaaagcaagcggaagaaataaaataataaatataagagcagaaacaaataaaatgaagaacaagaaaacaagaaaaacataaaaagctggttccttagaaatcaatgatattgaaaaattctcaattcaccaatatcagcaatgaaactgtggctatcactatagaccctggaaccattgaaactctatacattctctgctgctatcctcagttccctggcttcactacaaacacttgtacctcacatatcattaccaatgcagcagtcagaatgccagcaccccaggcatcagtgctattactgctctggaatacagagccttatcccttccatgtgtgtccatgcttcaagcctcagctctgaagttactccacaagcaccacttattagacaatgatgtcactgctaccatgagctagaccaatgccatgagagaacccctcagtgacaatttcctggtgggagagaaagagatcaggagcagccattaccactgaagactcaaaacagcccttgttgccaccacagatatgcacagtattgactgctgagggcacttgcaattatcatcaacactgaactcagctgacatagttgcaccatcactgttgtcagaatcgtaccacctcacccagcaagtaacctcacacccacaaaggaaggactttccaaagcaaatccagcctataaaatctgcaaggggtgactatttcattaaatgctcaaatatcacataaggaaacaagaaacataaaaaaacaaggagacatatcaccatcaaaagattacaataatttaccagtagctgaccacaaagaaatggagatatatgaacggcatgacaaagaaaccgagtgacttcaagaaaatacaaacaatgcaataaaaatcaggaaaataataatcaaataaaattagaaattcaacagagacactgaagtcataaaagaagaaatatttgagctgaagggtacaatgaatgaaatggaaaatgcaatacagagtatcaacagcagacttatttaaacagaagaaagaatctgtgaacttatagtttaattaaaaatatacagaggggaaaaatgaaaaggaatgaagaaagcttatggaatttgtgggacagcatcaaaagagcaaatactcaaattataagattcaagaaagagaagacagataaaggagcagaaaacttattttaaaaaataatagcagaagactttccaaatctggggaaagatataaatattcaggtacaataagatccaaggtctccattcagattcaatcaaactacgctgacataatcaaatggtcaaaaatcaaagggggaagagaaatcaaagacacaagtttcctgaaaccagcaagaagaaagaagcatatcaaatatcaaatataaggggatttaaataaggttattactagatttctcagcagaaaccttgcagaccaagaaaaagtagcattttttttattcaaagtgctgaaagaaaaaaaaaaactaccaatcaagaatacattgcctggcaaagctatacttcagaaatgaaggagaataacgattttctcagaaaaaaaaagcagaggaagttcatcaccactagacctgccttacaagaaatagtaagctgaaagaacaggatgctaattattaacatgaaaacatatgaaagtataaaactcattggtaagagtaagtacatagccaaattcaaaatattctaatactgaaatggtggtatgcaaatcacatatacttagcatgaaggctaaaaaataaaactattaaaaataattatagttacaataatttgttaaggaatacacaatataaacagatgcaaattgtgacatcagaaacataaaaaatgggggtggaataagagtatagagtctttaatgtggtcagaattaagttgctatcagtttaaaatagcctgttataagtgtattttatataagcctcatagtaaccacaagcaaaatctatatcaaatacagaaaagatctttttaaaaaaggttttaggccaggcatggtggcttatgcctgaaatcccagcactttgggaggccaaggcaggtggatcacctgaggtcaggagtccaagaccagtctggccaacatggtgaaaccccatctctaccaaaaaatacaaaaattagctgggcacagtggcaggtgcctgtattcccagctatttgggaggctgaggcaggagaatcgcttgaacccaggaggtggaggttgcagtgagctgagattgcgccattgcactccagcctgggcgacaagagtgaaactgcatctcaaaaaaaaaaaaaaaggctttaaattatgccctatggatatcatcaaactacaaaggaaggtagcaaaatagcaagaaaggaatgaaagatctacaaaacaactagaaaacaattaacaatgcagcagtagtcctaatctatcaataattacattgaatgtaaatggattaaattatccaataaaatcacatagagtggctaaatgaattttttttaaagacccaactatatatctcctacaagagactcacatcaccttgaagggcacacataggttgaaagtgaagagatggaaaaatattccatgcaaatggacatcaaaagagagcatgggtaggtatacttaacatcagataaaatagatattaagccacaaattatataaagatacaaagaaggttgttatataatgacaaggggtcaatttatcaagaacacatgccaattgaaaatatttatgcatacaacatcagaacaattagatacagaaagtaaatatccatatatctgaagggagaaatagatggcaatgcaataatagtaggggacgtcaatatgccatgttcaacaatgaacagatcgtccaggcagaagatcagaaagagaacaatggagttaaactacactttaggccaaatggacctaacagacagaacagtagatccaaatgcagcagaatacatgtttttctgaactgctcatgaatcattatccagcataagtcatatgttaggccacaaaacaagtctcaacaaataagaagactgaaatcatatcaactatttttttctgaccacattggtatgaaactagaaattaatgattatagaaatattgtgaaaattacatatatgtagaaattaaacaacattctcctgaacaactaatgcattatagaataaattacaaagaaaatttaaaactatccacagacacacaaaaatagagacccaacataccaaaacttatggggtgtagcaaaagcagttttaagaagaaagtttataccaacaaattccttcatccaaaaaaaaaaaaaaaatctaaataacaaacctgctttacacatcaaggaactaaaaaaagaacaaactaagcccaaagttagtagaaggaaggaaataacaaagatcagaacagaaataaatgaaataaacactagaagaacagtagaaaagatcaacaaattaagtattaagtttttaaaaagataagtaaaattgacaaacctttagccagactaagataaaagagagaagactcaaataaaatcagaaatgaaatggacacattacaactagtaccgtggaaatacaaagatcttaagaggctacaataaacaattgtacaccaacaaattggataacctagaagaaaagaatgaactcctagaaacacacaaccatcaagacagaatcataaagaaacagaacacttgaacagattgataacaactaaggaggttgaatcagtaataaaaagtttaccatcaaagaaaggccgaaaatcacatggtttcatgactggattatcccagacccttaaaaaagaactaatatcaattcttcttaaactcttacagaaaattgaagaggagggaatacttccaaactcattttacaaagccagcattaccatgataccaaagccagataaggatactacaagaaaagaaaattactggccaatatccctgacaaatataaatgcaaaaatactcaagcaaataccagtgtactgaattcagcagcacattaaaaagattattcattatggtcaagtgggacttgtccctggtatgcaaggatggttcaacatatgtaagtcaataactgcaatgcaccacattaacagaatgaaggacaaaaaccacatgatcattcaatagatgcaaaaaagtcatttaacaaaattcagcatcttttcatgataaaaattctcaacaaataaatatagaatgtacctcaacacaataaaggctttatatgacaagaacacagatatcatactcaaaggtgaaaagttgaaagcttttcctccaagatcaagaataatacaagaatgctcattcttaccacttattttcaacatagttctgaaagtcttagccagagcaattagacaaaagaaagaaagaaaggtcatccaaatcagaaaggaagaagttaatggtctctgcttcagaacacatgatcttgtataaagaaaacactaaagactccaccaaataaacctgttagaactaataaacaaattcagtaaagttgcaggttacaaaatcaatatgctaaaatcagcagaatttcagtacaataaaacaatctgaaaaagaaatcaagagaaactatttacaattggtacaaaaaattcttagaaataatttaaccaaggatataaaagatctgttcacagaaacttagaaaacattgaagaaattggagacacaaataaatgtaaaaatatttcacattcatgaattggaagaattaatattgttaaaatgtcaaaagtgggggataagacagccaaccagacacagctgggagaagtgcctctcctactgagagaaaccaaaatattgagtaaactatcccactttgaacagaatttttaagagaaaaaactgaaagttaatagagaggtgactcagatccagaggtggaagaggaaggaagcttggaaccctatagagttgctgagtgccaggaccagatcctggccctaaacaggtggtaaggaaggagagagtgaaggaactgccaggtgacacactcccaccatggacctctgggatcctagctttaagagatcccatcacccacatgaacgtttgaattgacagggggagctgcctggagagtaggcagatgcagagctcaagcctgtgcagagcccaggttttgtgagtgggacagttgcagcaaaacacaaccataggtgcccatccaccaaggcaggctctccatcttgctcagagtggctctagcccttgctgactgctgggcagggagagagcagagctaacttcctcatgggacctgggtgtgtctgatctgtgcacaccactatccaaccgatcccgaggctccaccctggccactcttgtgtgcacacagcacagcctctactgctacacctgagtactttgccagtggcctggaagcactttgtcccccctggcacaaatggtgctggaccacgaggggccagagaacaaagccttgggcgtggtcccaactcccaaatgtttgaacacacaagttggaatattgggctgagatctgtggccagggcctgagtaggggagaagctcccactctcagaacactgagaaaagtgaggcatgggtttctgggctggtacaggagctcgatgtgcttctctctacaagactggtgagggaaaggtgtaacctgtttgtcagccacaacatcttcctaagggagccttgtgtccgggaaaaactgacagaccagtgatctgggtgcagaaggcttgagacaaaactagctggttgggccagctatggggcaaatgctggaaagaaacctggtcagggagcctgagctgagtggtccccacagtcatctgcttggcaagaaaccctaggtcgcaggtgctagaccagctgcacacccacagcaacactgccatgcccaggatcctctgcccttgatcctgaatcaacagaccacttgcagatatacttcacagcccacgctgactctgccaagcacagacaaccactgggccccaggggagctgcaggtctcctggtcacctaatcttttttttttttatactttaagttttggggtacatgtgcacaacgtgcaggttacatatgtatacatgtgccatgttcatgtgctgcacccattaactcgtcatttaacattaggtatatctcctaatgctatccctcccccctccccccaccccacaacaggccctggtgccatggaatactatgcagccataaaaaatgatgagttcatgccctttgcagggacatggatgaagctggaaaccatcattctcagcaaactatcaaactatcacaaggacaaaaaaccaaacactgcatgttttcactcataggtgggaattgaataatgagaacacatggacacaggaaggggaacatcacacatcgggacctaatcttaagctaagtgtggctaagagcctatctgctggcctttactattaagcactgcccactggattgcagcctgaattacaccgccaaacaaatactgtttcagcatacattaccagtgaaacccaatgcaggaacatagtcaaaaataaacacctggcatagagacttggccctctgaaaacacccagaaaaaagccagctatattcaacatacatcactgtcaaaatatcaaggaaaatgaagaagaataaaacaaaaagtcaaaaccaaatgatagtaacttcaaaaagataaagtaacaccagctgtcttagatgagaaagaatcagcacacattcttgcaattcaaaaagtcagaatgtctccttacctccaaacaatcatactagctctcatcagattgaaatggctgaaatgacagacatagaattcatgatctggaaggtaaggaagctcaagaacattcaggagaaagttgaaacccagtccaaggaagccagtaaagcaatccaagagtacagagataacatagccattttaagaaagaaccaaaagaaacttctgcaattgacaaattcattataggaattttgtaatacattcagaagcattaacaacagaatagatcaagttgaggaaagaatctcagagctcaaagatcagtcctttgaatcaacacagtcagacaaaactaaagaaaaaaatttaaaaataaaacctctaaaaaaatatggaattatgtaaagataccaaacttacaacttatgggcattcctgaaagaggagaaagaataagtaacttggaaaacatatttgaggatagtccatgaaaatttccccaatctccctagagaggctgacatgcaaattcaagaaatgcaaataacccctgtgagataactacaagataactatccccaagacacatagtcataagattctccaaggtcaacgtgaaagaaaaaaatcttaagggcagctagagaaaagcctgaggtcacttatgaagggaagctcatcagactaacagcagacttctcagcagaaaccttacaaaccaagcaagattaggggcctatttttagcatccttaaagaaaagaaatttcagtgaagaattccatatcctgcaaaactaagcttcataaaagaaggagaaataggctgggcatggtggctcacacctgtaataccagcattttgggaggctcaggcaggaggattgcttgagctcaagagtttgagaccagcctgggcaacatggcaaaaccctgtctcttctaaaaatacaaaaattacctgggcaagactccatcacaaacaaactaacaaaccaaaactatcaggtactatgctcactacctgggtgacaaaatcatttttacaccaaacccagtgacaagcaatttacccatgtaacaaacctgcatgtgtatcccctgaacctaaaataaaagttaaaaaaaaaagaactttcatcaacatttcttgcagtgaaggtatgttagtgatgaacattctctgcttttattgcctgaaaatatctttattttgtattcatatttgacatatattctcactgggcataaaaattctaaattacaagtttttccccttttttgtattaaaaatttcattccaatatctttcatattgccttatttgtaatgatgccttctatccttcttatctttgttccatttataagaagtgttccccaaccccagactgattaaaaccatttttttaattaaaaaagcaaaagaaagaaacatttttatctgaagctgtctcagactcagacaccacccaatcttcagatttcaaatagcttatactcaaacatttggtaatatcagccccttaatggtcttcctggagggcagatgcattctagagatgagaacacgatcatgattacgaatgctaccaccactacgaacgcacaaaagtcactggtgtgatcctttctcagaacactgtggtaacttctggacattctctgctgttatcattgcttcttccttctgggtttttttcccccttatatgggcagataattttctccattggaatgaaaaagtcttgcttcatgctctttaactgtgtgaccttgggcgtattactttactttggggcaaaccattttccttcttgaggaccaaatgtgctcttttataaaacgagcagttagaattagattgtctctctggacacggcttatgttgacaacctggatcacattagaggatcacactgagacctttatgtcggcctcagttcctccatctgtaaagtagaggttgggcttagattatagatgataaagacaccaactttcctggaaaggattctggaaaggattctgaacttaggctcagcctcagtaagaaggagttctgtgattaaacagggatgcccacacatcagcaacagaaatgggcaggtcaaccatgtatgctgtgcctcagtgaagattttatgctatgctgtgcatttgatatccattctctatatttgatatccaatctaagattatctagaaggtcctttccaagacactgatgagatacatctgtataaatatataactcaggatgaaagcaacttttaacatttagcgtgtgcctctgcctctgatctgattacagcccacagagaaatataaacaatacacaatacaggctaatgaagaagggtgataagatttttttttttttttgagacggaatttcactcttgtcacccaggctggagtgcaatggtgcaatcttggctcactgcaaccttcgcctcccggttcaagcgattctcctgcctcagcctcctgagtagatgggattggaggtgcccaccaccacgcccggctaatttttgtattttttagtagagacagggtttcaccatgttgtccacgctggtctcgaactcctgacctcaggtgatccgccagcctcagcctcccaaagtgctaggattacaggtgtgagccactgcaaccggccaagggtgataagattttaaaaatttatttaaaatacagaaatttcaaaaagagagaagtgcagtgatagcaaaattgatgcaaactgtgcaagcatgaaatctattttatagctgaatctacttttcttggtcccaagattctatttccattggttttcaaatagttaattctattgttttttcagggagattactaaaatcactaataattattttcctactgacacaaaatctaaaaagcaccatatagaccttctctctccatctccccttatccttatgtcaccttaccctaccccaatactccaatggcagagtatctacccatggcagagtagagaatatgtacactaacaaaaccagatgcacagaggtggggtatccatctctgacttggctgagctagtctaaggaaggaaggctctgtggccattgtccttggaagtcattctcacaggttggtggtattctcaagtaggtggtgcttgagtggcccaagagcacccacatgctgctatgcatttttctgacaacctctttatgatctctgactttggcagatcatcttgcatctctcaattggagagtcacttttcttatctccacagaaaattcttaatcaagctcctggttttcctttatagcttctactttttaaactcacttctccaacttcaccgctacatctctgacagatgagaacattagagattccctgtttttcaaaaacaaaacaaaactcagcaaaactataaatatactaagggtaagtctgtattatctcctgccaaaatacaccaccctgcatttttttaaatttttatcttttgtaggtacatagtaggtgtctatatttgtggggtacatgagatgttttgatacaagcatgcaatgcataataaccacatcatggaaaatggggtatccatcccctcaagcatttatcctttgtgttacaaattatctaattatactttattattttaaaatgtacaattaaattatttttgactatagtcacctcgttatgctattaaataccaggtcttattcattctttctaactattttttgtacccagtaaccatcctcaccttcccacacacgcccaccacctttcccagcctctgataaccatccttctactctctatctcccttgaattcagtagttttgatttttagatttcacaaataagtgagaacatgcaatatttgtctttatgttcctggcttatttcacttagcataatggcctccagttccatccatgttattgcaaatgacagcatctctttcttttttatggctgaataatactccactgtgtataagttccacattttctttatccactcatttgttgattgacacttacgttgcttctaaatcttggctattgtgaatagtgctgcaacaagcacaggtgtgcagatatctattcaatattcttatttccttttggaggggagtgtgtacctagcagtgggattgctggattgtatggtaactctattttcagtttttttaggaacctccaaactgttctccatagtggttgtactatcttacgttcacaccagtagcatacaagggtttccctttctccaaatccttgccagcatttgctattgcctgtcttttggataaaagccattttaactggagtgagatgatattccattgtagcttgattttcatttctctgatgatcagtgattttgagcaccttttcatctgcctgtttgccatttgtatgtcttcttttgagaatatctattcagatactttgcccatttttaagttggatcattagatttttttcctatagaattgtttgagctctttgtatttcctgttattaatcccttgtcagaagggtcgtttgcaaatattttctcccattctgtgggttgtcttttcactttgttgattgtgtgctttgctgtgcagaagctttttaacttgatgtgatcccatttgtccatttttgcttcgattgcctttgtttgtgggttgctactcaagaaatttttgtccaaacatcctggagagattccccagtttcttatagtagtttcatagtttgagatcttagctttaagtctttaatccatttgacttaatgttttgtatatggtgaaagacaggggtctagtttcattattctgcatatggatatccagttttcccagcaccattttttaaagagactgtttttcccccaaagtatgttcttggcaactttgtcaaaaatgagtttactgtagatgtgtggacttgtttctgtgttctctattcttttccattgctctatgtgtctgtttttatactagtaccatgctgttttggttactatagctttgtagtataatttgaagtgaggtaatgtgattcctctagttttgttctttttgcttaggatggctttggccatcctgcatttttaacccttttcccattttcacccagaatactcgctggtggcacttgcagctgcagggtttaccctgagataactttgccacaaaatatctcgcctttattattattttcacatcgttctaatatatcgactttgaaaacacaaatcatcattctatttatagcatcttgttgttagcagtggtatttccatttacaaaatatagaaattcttgatcgctgaaaatgtcaaattctagaaagcatagcattcccatgttaacattgttctcaaacagttttgggccaaagagtcatttaatgaatccggttttttccaaaatagatgattctgattattcagatgattctgatgttagttctgtttaaaaataattccaagaacagtttgtatattttattttcacactgaacatcagtcagcctccagagcatgttaatgtaaaattaaatgaacatgggcagtgagctgcagttttttttctaaacagtgcagctgtttagaaaatttttttaaaattttcctgatttccttggtattaaacatatgtgggagaaatacagctcagcaaactcttccaggagataaaatgctgatcactcctactgggcaatttcacaaatgtctcctatatttttctcctttggtagtggggatggggggcataatgttacattgggcctctctcctctctctctttctctctccctctccttttaaaatgtttcctctctctcaatatttcatttcttatttgtatttctgaatgagggaaaagagttgatgggacagcggaacgggaaaaagaagagcaccaataaaacctgttttcctgttttcactattttcattccaaattccttctgtctcataattgatggaatcttatgaacttattagttaaaaagtgtctttcttgtttcacaggaattcatatcggggtgatcactcagaagaaaaggtgaataccggatgttgtaagctattgaactgccacaagtgatatctttacacaccattctgctgtcattgggtatgtacaaagtgctgcatacagacagaggagaaggacaattgagcccatctaaagttaacaaaaacttcctcttggggctgtttctttccatcagaccttacagttctacgggataatagcttatctcataaggcctcagctttctttaataatttctagaagcagacgttattgtgtcatgcacactcagtgttgcaaattaatggtctggtgatctgggtggcatggcattttccccttctctggttcatcacccatgatagaccagtaaaggtgaccacttaaattccttgctgtgcagtgttctgtattcctcaggacacagagcttcctctctcccaggagccatgaatatcctgatgctgaccttcattatctgtgggttgctaactcgggtgaccaaaggtaatggaaccctataaagcagagatgatgactaggatgagttgttgcccttgggctcccctggtatcatgatgggaagagagggaatctgcaggaaaaatctgggccaacaaagagcagcagaatgctcttattttggcagctccatgcccctagtctctgagaatctttctgttaggggcatctagcaagctgggatgtcctctgaggcatttctccaaagacaagaatttccttaatgctctgagccaccctatctgtctctctacataactatccaatgttagttcagcctcacttcacttccatttcgattattctgttgtatctatttcattgttgtgtcctattagttctcctaccatcttgaattcttctttgcccggagggtaccttcagagggaggccctcactttcatgttcttagatatggtgaacaagtccattgacagtttgtagattctgtagcactatcatatggaagagacaatatatatgtttggggtagaagtggaaataagtggagtgaagacaggatagacagactagtgaccaatggggagcttctaattttagatgaataggaacagtctgtttccactatttaataatgctacttttgaaaattgttaactttttattaaaaaataatacttgcaattgacttatgtatcaagcaatcgatggatttatagggtttaaggaaaagaaaaatgtttgtctgtccaagaataccagttcttcagtcttccccttcagaatcaatcaatgttaccaatttcttatatatcctagcaaatacaaatatatttatatttgcatgtgtataccttttagatttttaaaaaatgcaattgcaaatgcaccatgtgaattgttctgcaatgtactagcaatatattagagacatcttatccatacataaacctagttcattatttttaatcgataagtaaaactttgaggaggagcagatgaattgcctcacattaattactccgctactgatgaaaaataggtctttaattatcaaaaacaattcagcaagaaaaatttgtaaacaaatgtatgtcttttcatttatgactggacacgtggacacacacacacacacacacacacacacagtcaaaccacctaccagaaaagctgaactattcttctctcctatcaccagttgcaagagtgtcagcttcccacaccctcatcagtcctttttgttttttctactacattcagttttctactacattcagttttacagtctaatatgtgaaaatgatgtcctgatgtttgaattcatgacactttagttataaatgagtttgaacatccagtccattagatttctaaactttcttaattatctttatatactaagaaatttggcttttgttaaatttggaggtgttatatgttgcctagaaagatgctattcatgtctattaaatggttataactgtgcctatgatctgttatgtcttgattcacatgttgatgtaatgtgagttacagaattaatatctacattcatttctgattataaactgctgtatttgttgaaaatttggaaattttgaaattgtaaagaagtaaaaaaattgtaaagaagttaaaagagacaaaatatttttgatctattgttcttcctcagttttcttatttgaataaaaatgtatagcatacttataaattttctattatactattagtattttcccatttactattttcaaaaactgtatttccaatgactgtataaattttatagaatggatactgtttaaattacttagccaaattgtttttgcataaataagtgcatttacattttatagacaaggatggctagtataacctttcttatacataaatcattcagcataaaattcctggagatgtacttttttctgtctgcttcatgtgttatcaatttttgaatacttgccaagtcctaaaaatgaaatattatatataaatatttaatttttatttatgtctgtgagtaatggggaagtcgaacttcaaatacatgcttaatgtatatttaacttttctacaaattgtctatgtctctctttctcttttattttggagaggtagttttcatttcttttgatttagagattttcatttttgtgttctcttataggttttgttttgaaatttagctatttagtctctctgggctttatattatgtgttttcaagtgagatagcacctgatggcttgtgaagcaactttttaccaagccaagctatcagtggactggtatccatagatatattttaagttgatgctagctgattatatatctggtatgttttagaaagaactccacacatgggataatgttttggctagatggctcccctacttagaaacatacaattgctagtcatatttctaattttaggatttcgagatactggtgatgaagatcacatgtcctaacaacataatagttccagactgaagttctttgaaaaaaatgactgttgtcactttagaaaaaaaaaattatgaattattcccaattgccatcattctactgctaaaaccaaattcttggaattatctatgatttttctatatcctatgacactcatatctatcaggaagtctattacatctgcctgcaaattatatccagaatgcaattattctcgccacctccattgctgccactctgattctagtcaccatcatctctcacctgtgttattgccatagcttcctcatgagatctgtccttctgctcttccctgccaccatcttgtgaagacacatagtgcatgatccgcttacactggaagtcagatcatgtacttttgctcaaaactctgctatggccccctctatactcagagcggtaacaagagtccatacagtggctcacctggccctgcaggatctggcccttatgacctctctcacctcatctcctactattatagtccttgttcactccactacagccacacaagccccagtgctcttccccaaacatatcagacttactcaacccatagagctttgtttgtttcctctgcctagaatgtacttgcctcagatactggtgtgactaattcctttacctccttcaagctgtttaatcatcaccttgttacacaggcttgtgcaactcctgtttatgaatcttctattacccttaaatctattctcccttctttctgcaaaccatttgtcaccttttcatctacaaaataatgtacttttttattaaggtaaaatatacatttaaaaattaccatccttaccatgtttttaccatatttttatgtatacctgatggctgtttgtatgtcttctgttgagaaatgtctattcaaatcttttgcctgttttaaaatcagattatttgtttttgtttgctatggagttttttgagctccttatattaatatactttttgttgttaattcctcgtcagatggatagcttgcaaatattttctcctactctgtgggctacatcttcactttgttgattatttcctttgctgtgcacaagctttttagtttgatgtaatcctaattgcctatttttgctttggttgcccgtgcttttgaggtcttacccaagaaatctttgccaagaccaacgtcctgaagtgtttccctaatgtttttttcaggtagttccatagtttcaggtcttagatttaagtctgtaaaaccatacagtctagcagggagtgcatttactttttattatctgtctccctctgctagaaagtcagctccatgtgatttttgtctgtttagttcacagatgtacctcaagggcccaggatagtgcctgtgccatagtaggggcccaaaactttgatgactgtgtgactatagcctaatttaagaatggaggggataatttaaaagcagtaggaaggaatgtaagtgagaaacaattttgaagaataattgacagaacaaggcgattcaaagacaaaggagaagaagagagccaagatgacatatttcaagtatggataatgctggaggaaaaaaattaagatataaatctttgtagatgtgaggaacgaagaagcaaggttagagtctgtcttgcacaaaagaagtggaaggtctagacttgaaacttatagaaaattccacgaagtacaaagtaaaatcgagccagtaaaataacaaagatagaataaatgactctagaggagtgaaggtagaataaataattggtgaagctggactagagccaacatttcccagaggataaaatataaaccaaattattgtgagcctaatatatacatacatacatacatctatatatgttttatatatattatcacattaagttcaaataaggttgtttagaaaattacttgctcttctgcacatataccaggcttcctcctccatagagccttatctctagctgcttcctctgcctagaatacacttatctaggtactccttgggcaattgtcttgagaaagatgatcatgccgtttactgcttgataaatgaacatacaatgcagcacactagtttccctttagatttatatcctcacccctcaaatgagtagtcacactgcttggaaatcctactgcatttctcttgtaaatgaaccttccttcttttttttttttttttgagacagagtctttctctgtcaccaggctggactgcagtggcccaatctcggctcattgcaaccgccaactccctggttcaagtgattctcctgcctcagcctcccgagtagctgggatcacaggcatgtgccaccacatccagctaatttttatatttttagtagagacaggttttcaccaggttggccaggatggtctcgatctcctgaccctgtgatccaccctcctcggcttcccaaagtgctgggattacaggtttgtaccaccacacccagccatcttccctcttttttagacaactattttgtcctgacctttatttgtcttttattttcctgctcctctcctctacatggctctccccctcagtttatcccatgccccatttatttaaacaattcaaataggaagttttcactcatttcctctgtcccctttgccataaatggagaaacgtgtcttctccatctaaagatcagtctgctctgtgtgaatttgtgactatgcccttctgtcatctcatcaccctattctatattaatctctccttttctgcttttttttttttttttttgagatggagtcttgctcttgttgcccaggctggaatgcagtggcacaatcttggcttactgcaaccttcgcctcccaggttcaagtgattctcctgcctcagcatcctgagtagctgggactacaggtgctcgccaccatgcccagctaatttttgtattttttagtagagacagggtttcaccatggccaggctggtctcgaactcctgaactcaggtgatctgcccgcctcgatctcccaaagtgctgggattacatgtgtgagccactgcgcccagactgcttgtctcttttctcattgcttgcaagcaccatttggtatttctcgttcttcaaaacaaacctgaaagctttcccttaaccttacattgctctctaacaagttatttatttctctgcttttctttggatctaaacttcttaagagtttcatctacaggtcctgcattcacttctctctcattcacattttgaccaactgcaatttggtttcttttttcataccactcggaagctgctctcctcagtatgaagttaccttcatactactaaaagcatggacattttcctgccttcatcatttttttttaacctctcagcagtatttgactacaaaatgaccactctgtcctttaagaaacagtctcctctcctgcttaatgtagtcacatctgatacaactttccccataaccttttatgcattttctgttttcatgcatatcagcccaacttgcaattgtcagtatctccagtctttcaacaactgcttgtgaaatacccctgtacagggcaatccagaaatgccagaaaattatcagctgtctctggatcatctgtcaactatgggggaagctggataaatagtccaggtcctttgagcctcatgtagaataactttgaggcttggtaatattttttttttcctgtggtaattcccttatttgcagttcaaggctattatgggaagaaaacataaatggatgttagttcttcaaggtttttactgtaactgtgcaccctttcattcttcaaggtttttctgtaacactgcaccttcaggacctgatgcccaattaaacatttttttaagttttttggtttttttttaataaaaactaaatgctattttttcttctacttttagttgatgtgtaataattgttcatatttagaagatgcagagtgatattttgatacatgtatacaatgtgtaatgatcaaatcagggtaattagcatatctatcacctcaaacatttgtcatttttttatattgggaacattcagaatcgtctcttctagctatttgaaaatatacagtaaatgattgttaactaccgtcaccctacagtgctatagaacagtggaccccttttggcaccagggaccagttttgtggaagacagttttttcgacgaggtgaaggtggtggtggggatggtttcaggatgaaactgttccacctcaggtcatcaggcattagagtctcacaaggaacacacatcctagatccctcacatgcacagttcacaatagggttcatgctcctatgagactctaatgccttggctgatctgacaagagatggagctcaggtggtgatgcttgcacacctgctgttcaccttttgctgtgcagcctggttcctaacaggccatggaccagtacccattggctgcccaggggttggggacccctgctataggatgctggaactttttcctcctatctaggtgtaattttctatctgttaaccaacctctctctatcctcctttcccttcccagcctctagtaatcattattctacagtctacttctatgaactcaacttttttagctcctgcttatgaatgaaaacatgtggtatttatctttttgtgtctatttcacataacggaatgtaacatgtcccccaggctcatccatgagtctgaggcttatttgtagcctggctgctgggcttccctgtgggattgtcctctgagcaaacagaacacagccatcctgctggccagcagttgatagatgatctcatgataataacaggttataactcaccttttcttggatttcttgctttcctgatttctacatttctccactgattttttttaaggaggaattgtctctcaactaaactattatattcaaatctttgctggagctctgctctgctgggggtctgctttaagactctagagtcttattctcctgttttgatctgacttatcttattggtccttttaagtcgtttcctcttatctgatctcttatctcttaatattgaaactcactagaatttaattctagtcctctttttttctcatattattccaacccaccatggtttaccaatttctgtactttaaatgctatccataagcaatcacatttattgatttgcatatgtcgaaccaaccttgcattccaaggataaaggctacttgatcgtagtggataagctttttgatgtgctgctggattcagtttgctactattttgttcaggatttttgcactgatgttcatcaaggatactggcctgaaattttttttttcttgtgtctctgctaggttttggtctcaggatgatgctggcctcatagaataagttaaagcggagtcctgccttctcaattttgggtgaatagtttcagtaggaatgataccagctcttctttgtatatctggtagaattcagctgtgaatccatctggtcctgggcttttcattttcatcctttctttctaggtttcgtatcagtctcagtatgctctctctctctccgtccctctctttttctacatttctccttttctccatacaacttctttgatggcacatagcacaattttaatatacactttttgttctcctgtttgtctcttacaatggctttttgtatttgacatcatattagtctagatgtcagtcagtgtaaatttttgaatgaatgaaaagttgttatgttgatgccagagttaaaaatttgacctatattttattctctacaggtagctttgaaccccaaaaatgttggaagaataatgtaggacattgcagaagacgatgtttagatactgaaaggtacatacttctttgtaggaacaagctatcatgctgcatttctataatatcacatgaatatactcgacgaccagcatttcctgtgattcacctagaggatataacattggattatagtgatgtggactcttttactggttccccagtatctatgttgaatgatctgataacatttgacacaactaaatttggagaaaccatgacacctgagaccaatactcctgagactactatgccaccatctgaggccactactcccgagactactatgccaccatctgagactgctacttccgagactatgccaccaccttctcagacagctcttactcataattaattaacatttacttctggtatggaacaactagaaatactgctggaaataatatccaaagagctgattctaccaatccaatttcaccaggaaaattccatcagggattggatgaccatggggatggacataattgctactaccaacacaacagccaagagagttgccttacaattagaaatgtgtagacagaaatgtatagaagatacaaggattctcttaattggacttaaattctttatctgtcttcctccgatgtactcaaatatatgagctaatttttgtcttaagtgaacatttgtatatctatgtatttttccatgccaaaaacaaaaacgaagaccattgtttggagctgcctcttatgactaagacaagaatttttactttaacagtgcctggcccactactatcgtatataggagaacatataaaagcatatagaaagttccagatgaatgttcccttctctaccctccaccttttattgtaagttctgaccctaaatacttttctgtgtcatgacgtcaaattttgtttaaggttctagctggtaactaacagagtcagaagctaattctttcattcaacacaagcactgatctaactggatagagataaaagtgggacttgccttgagagtacatcatattaaattaaaagctgcatctcaaattctacttatctttccaatcttctttccacttagaattccaacttccaagtatggcagcctcataacatgcctcttcaggtctctgtgttgtccatgaatgttagttgtgtgcagtgtttctatgctttgtatggctgtacgcatgtgactgctgtttgtatggcaacaggtgggtcagtaagtgtcttctatgatactacagagaagcggttattaactataaagttgattaggtttttttttttttttgagacagagtctagctctgtcgcccaagctggagtgcagtggcatgatctcggctcactgcaagctctgcctcctgggttaacgccattctcctgcctcaggctcccgagtaactgggactacaggcacccactaccacacctggctaattttttgtatttttagtagagaggggtttcaccatgttagccaggatggtctcgatctcctaacctcatgatccatccgccttggcctcccaaaatgctgggattacaggtgtgagctactgtgcccggctgattattattttttttaagttccaggatagaagtgtagaacatgtaggtttgttacataggtatacatgtgccatgatggtttgctgcacctatcaacgcatcatctaggttttaagtcccgcatgcattagctatttgtcttaatgctctgcctccccttccccacacaccctgactggcccccatgtgtcacgttcccctccctgtgtccatgtgttcttattgttcaattcccacttatgagtgagaacacgtggtgtttggttttctgttcctgtgttagtttactgaagatgatggcttcgagcttcatccatgtccctgcaaagagcatgatctcattcctttttatggctgcatagtattccatggtgtatatgtaccacattttctttatgcagtctatcattgatgggcatttgggttggttccatgtctttgctattgtaaatagtgctgcagtaaacatacgtgtgcatgtgtctttataatagaatgatttatattcctttggatatatacccagtaatgggattgctgggtcaaatggtatttctggttctacatccttgaggaatcgccacactgtcttccacaatggttgaactaatttacattcccaccaacagtgtaaaagtattcttatttctccacagccttgccagcatctattgtttcttgactttttaataattgccattctgactggcatgagatagtatctcattgtggttttgatttgcatttctctaatgatcagtgatgttgagcttcctttcatacgtttgttggctgcataaatgtcttcttttgagaagtgtctgttcatatcctttgcccactttttgatgttttttttttcttgtaaatttaagttcttgtagattctggatattagacctttgttagctgggtagattgcaaagcgttcctcccattctgtaggctgcatgttcaccctgatgatagttttttttgctgtgcagaagctctttcatttaattagatcccatttgacaattttggcttttgttgcaattgcttttggtattttcttcatgaagtctttgcccatgcctatgtcctaaatggtattgcctaggttttcttctagggtttttatggttttgggtattacatttaagtctttaatccatcttgagttaatttttgtataaggtgtaaagaaggggtcccgattcagttttctccatatggctagccagttttctcagcaccatttattaaatatggatcaaattcacacataacactattaaccttaaatgtaaatgggctaaatgccccaattaaaagacacagactggcaaattggatagagtcaagacccattggtgtgctgtattcaggagacccatcacacatgcaaagacacacataggctcaaaataaagggatggaggaaaatttaccaagcagatagaaagaacaaaatagcaggggttgcaatcccagtctctgacaaaacagactttaaaccaacaaagatcaaaaaagacaagagcattacataacggtaaagtgatcaattcaacaactagagctaactatcctaatatatatgcacccaatacaggagcactcagattcataaaacaagttcttagaggcctacaaagagacttagactcccacacaataatagttggagactttaacactcagtgtcaatattagacagatcaatgagacagaaaattaacaaggatattgaggacttgaactcagctctggatcaagtggacctaatagacatctacagaactctccaccccaaatcaacagaatgtacattcgtctcagtgccacatgacacttattctaaaatcgaccacataattggaagtaaaacactcctcaggaaatgcaaaagaactgattagttattaataaattgggctgaggcttgggcgctactgaaagccacaatatcagatgccagaatgtctcaaaatcaaaaaggttttttcctctaattattttttatgtgatccaagccaagctgccagtgactatggctgtagtttggatgttgaccatcagaccactgacctttcagtagacctcatattctaataggtcttagaccaccagttagggtgtccatcattcagatttgattgggactgaggggcttcccagaacatgggaattagagagctaaaatcaagaaaatccagagtaaattgggacaagttgatcaccctcacttcagtgtacttctgtctagcaagctatttttccatttttcatggctatacctcatcacataggtcatacattggcttttcacagaatcagtctagggtgctctttttccatatttttgcctcaactgtcatttcctgaaacacactccttgagcatgcagaacaccttccattctactttgtattattttcttcccatcatttgaactctgaaatcattttgagtatttactctctctctgattttttttactaacttatggcctaacacccctgctataatgtacatatagtcctcatctcttggtcttgttgacctatgtgatccaaactgcaagaacagtgcgtcacacatgagaaatgctcaataaaaatttgagaacaaattattcaggcagttatcttaatatatatgagaaggttatataatataaaacagtagtcttcaaactgcaatactggttacaaaaagatttttcaagctatacatattgatagtttaaaggaataaaatttcagaccctcaagttccaaatttcttatgatgttttggagcattcttaacaggctcttcttttataactccaatttctcaattttccttctcccactctgaaaagaaaacttacctctcacccaccctttatctgacaatcatggattgccctgagtgaacaaacctccagtggacaattgaaatactagtgctggtattcagaaagtgaataatcatagactttgaataaaaatcctttggaaataaaagtgtttttaatttttttgtttacaaaagcaatgatggggtgtcaatcaagttgatggttaatattaaatagatctttgaagataaactttaataatagcctactatgaaattttttagcatatcacttggaagaggttaaaagaactgtgtaaacattagagtcttatgttcaaagagatttcacaataagctacaatgtatgtctatgttttgtcacagagaaatgtgatagaatgattaataaaagacttgcaaacacaaaaatatagtacattaggatcaaattttgcagagaagtttgaataaaaactaaagttttaaaaagaaaaaagatacaatgttcccaattgctaaaaaagagcttctttgcatatttattaaatgaattattgtgattagcaaattgtcatgcattcatattccattggatgtatttagtatttagttgttacatgtcaatatttgtaatatgctattagttatctttttatgattaaaatttaagatgaaatagtttatttcccaattttaaattgtattgggaaaatacacactttatttttatacctagcatagactttttgttccttctaattggaaaaaggctttgcaatttgcaattggtatatgtgtgacttctagaaatgtggtgttctttttttgttttttgtttttttgttttttttgagatggagtctcactctgtcgcccaggctggagtgcagtggcgccatctcggctcactgcaagctctgcctcccgggttcacgccattctcctgcctcagcctccctagcagctgggactacaggagcacgccgccatgcccggctaatttttgtatttttagtagagacggggtttcaccctgttagccaggatggtctagatctcctgacctcgtgatccgcccaccttggcctcccaaagtgctgggattacaggtgtgagccaccgcgcccggcccaggaatgctcttaaccacttcatcaagcatcaaggttggcactgtctagatgttggttttgattgccaacctacaaaagaaaagggaaattataaaagagaaaattaacaagtgagtacagtttcaaaatctgtcctgcaaatgtgttttaaaccaaagaaatcatctttggcatgggctatttgctttatagtcattcagaattgcttggtctctgtctcctgaagactgtggctaggattattcctgatgaatgagaaagttaccataaatcaaaaataaaatgaatagaaaacttaacagttgactctcagaagaaggtatcttccctcactttgcactggttatatatatatatatacacacacatacatataattgtataatatgtattattttataaattgatttagaaggtacaagtgttgttttcttatatgcatatattacatagtggtgaagtctgggcttttagtttagccatcacccaaatagtgtacattgtacccattaagtaatttctcatttcttagcccccttctacccttccaagtttccagtgtctattacccactccttatgtccatgtgtatacttagtttccacttgtgagaacatgtagtatttgactttctgtttctgagttatttcacttcagataatgaaaacattcacttcagataatgaaaacacacttttcaaaattcaaagaggtttgaaaagctcatggcctaatacccccactataaattttatttttaaactgttcatactcctagaatgaacagaggcttcaaacactatctggtataaactgatgatgattcttctactactgtgatcattctgtttttctatgattcctggattttccttttccatgaatgtgggctttgcagcataacttctagtttgtttatatcattgccctttaggatctcctgtaggctcagtaatctatcacttccctatatgggactgacctccaaattactgactttatatgttctctctctctctctctctgtgtgtgtgtgtgtgtgtgtgtgtgtgtgtgtgtgtgtgtgtgtgtgtgtgtttagtatttgcattttgccacattcttatatagtttccagctcaagtctgaaattctctacctctttatctatgctgtccatattaggtatatgatttgataagttagacatgtgacatatatttcccccattctctgggttgttttttcattatatcaatggtgtcttttgaagtagagcagtttttaattttgatgaagttctcttttttaaaaacacttttctttttggtgtcatatctaagaaatcattccctaatttaaggtcataaaggcttattcttgtgttttcttctaagggttttagctttcacatttagctgtacgatcctttttaatttaatttttttgtatgatgtaaggtaggggtccaaattcattcttttgcatgtggctctccagtttctccaacactatttgataaaaagactatttacccactgaattgtctggacacccttatagaaaatcaattaataataaatgtgataatttgggcagatctttggagagaaagcaccaagagtggatggagaggcaacactgacaccaaagctgaagagagaggaagctggaatctctgcatgaggtgcctgaacattagggctagttcctgaccctgagtggctcctggggaaggggtaagtaaggggactaaggaacatcccgcttttgccatggacctctgggatcatagctacagggtaccccatgtccctcatggatttgtaggctagcagggagcaggcagagacagggcttcagccagtgtgaagcccaggagcttttgtgcatggggcagctctggcagcgcatgaccgcaggtgcccatccccaagggctccccatcttcttctgagaggctgtagccccagctgactgctggacctggagagagtggcgccagctttgccatgggactggggtgcatctgttctgcaggctctcctgcctgccagcccctcccatggcccctgcctagccaccctgcaggagcatgagcacagcacagcctccaccactaagccggagtgctttgctccacctgagtacattcccagtaacctgggagcacttcagatccctcagtgcagctggagcttgaccccaagccacagatcatccccgtgccccagggctgcagcacacagcttgggagcatgcagctgagatctgtggctgacaggcaagtagaggagaggcccccaatatcagaacataaagggggcaagatgtgtgggttcatgggccagcttgggagcaaggtgtgcctccctctgcagggttggtctggaaagggtgtggcccatctccctgccatggcctctgcccaaggaagccccacagcctggaacacctaacgaaacacagaaatgatgccagtgatcagggtggggtccctaaaggcccaagagcagatctggtgaggagttttctctcccactccactcaccatagaacatgcctgcaaatggaaggacatgcaaaagagctgagtaacagcctatgtaccagtcactacttaagcatcaatgactagatctcagccccaactacagcaccaaaaatgattctgctaatatacacccctgtgaaaccaagtgcaagactttgcccatacataaagatcctgtacagagccacggacctctgaaaacatccagaaatgaactcaactgactatattcaacttacaccacatttaaaagaaaaccagcccccctcccaccagaagagaaagaatcaatgcaagaaccccagcagttcaaaaagccagggtgtccccttacctcaaaatcagcccactatctccccagcagtggtccttaaccagactgaaatgacagacatagaattcagaatccaaatggcaagaagctcattgagatttaggagaaagttaaaatccaatccaaggaatccagtaaaatgattcaagagctgaaagatgaaatagccattttaagaaggaaccaaactaaacttctagaactgaaaaatttgctacaataatttcataatatgacagtataacagtattaacagaatagaccaagctgaggaaagaatctcagagctcaaaggctggtccttcaaatgaacaaagtcagaaagaaaaaatctttaaaactgaacaaaaccaccaagaaatatgagattatgtacagaaacaaaacttctgacacactagcattcccgagaggagggaaagagagtgaacagcttggaaaatatatttgaggatatactccatgaaaatttccctaatctcactagagaggttgacatgcaaattcaagaaatacagagaaccccagctagataaaatacaacatgaccatcccaagaaacatagtcatcagatttgccaaggtcagcatgaaggaaaaaaaatcttaaagccagctagaaagaagggtcatgtcatatgtaaagagaaccccatcaggctaacaccagacctctcagcagaaacctgacaaaccagaagagattaggggcctttttcagaatccttaaagaaaagaaattctaaccaagaatttcaaatcccatcaaactaagcttaataaacaaagaggaaataaaatatttctcagacaagcaaatgctgaggaaattcatcacaaccagatatgcctccttacaagagattcttaagggagctctaaacctacaatcaaaagaacaacacctgctacaaaaaaaaaaaaaaaaacatacttatgcacataaagacactataaagcaactacactatcaagtctacataataaccagctaacaacacaatgacaggataaaaatctcgcatatcaatactaaccatgaatgtaaatggactaaacaacccacttaaaggacacagtgtagcaagattgataaaaagacaagacccaactatctgctgtctttaagagacctacctcacatgtaactacacccacaggctcagagtaaagggataaagaaagatctgtcacacaaatggaaaacaaaaaagagcatgagttgttattcttatatcagataaaacagactttaaatcaacaactatgaagagggacaaagaagggcattacataataataaaggatacaattcagtgagaagacttaactgttgggcctggagagagtgggaccacctttgccatgggactggggtgcatctgttctgcaggccctcctacctgtagcccctccgaaggcccctgcctagccaccctgcagaagcatgtgcacagtgcagcctccactgccaagcctgagtgctttgctccacctgaatatgtttatattctaaacatatatgttcccaacattgaggcacccagattcataaaacaagttcttcttaacctataaaaagatgtagatagccatgcaataatagtgggagacttcaacaccctactgagagtgttagacaaatcactgaggcagaaaattaaccaaaaaatcctggacttcaactcaacgtttgaccaactagacctaacagacacctacaaaatattccacccaacaacaacagaatataacttccttcttctctttggcacgtggaacatattccaagattgaccacatgctcagtcataaagcaagtctcaataaatttaaaaaagtcatgctgagcccattctcaggccacagtttaataaaaatagaaatgaatatcaagaagatctcttaaaattacacaaatacatagaaatgctcctgatacctgggtaaacatcaaattacagcagaaaattaaaaaattatctgaattttttattaaaatagggacacaatttaccgaaatatctgtgatacagccaaagcagtgttaagggaaatttatagtgctaaacgtcatcatcaagaagttagaaagatctcagattaaccatcaaagtttgcacctagaactagaaagaaaagaacaaaccaaccccaaagctagcagaagaaaaaaaaattactaaaattagaaaagaactgaaaaaaattgagatgcaaaattccatagaaaggaccaataaagccaaaaggtggttttttgaaagaataaaaaaggttgatagactgctagctacataaccatgaagaaaaaagaagaccaaaataaatacaataaaaaatgaagaagatgacattacaatgaatcccacagaaatacaaaagatactcagagatcattttgaacaactctatgcacacaaattggaaaatctagaggaaatggataaattcctggaaatataaaacctcccaatattaaagccaaaggaacatgaaaacctgaacaatcaataaacaagttcctaaactgaatcaataataaaaacctaccagcccaaaaaaaccctggaagagatggattcacagcctaattctaccagacataaaaagaactggtatcaattctactgaaactattccaaaaaaatctaggaggagaggctcttccctaactcagtctatgaagccagcatcagccagataccaaaatctgtcagagacacaaataaagaaaacctcagaccaatatccctgattaacatagatgcaaaaattttcaacaaaatactaggaaaccaatcccagcaacagatcaaaaaattaatacatcagaatcaagtaggctttattcctgggatgcaaggctggctcaatatatgcaaatcaataaatgtgattcaccacataatcagaattaaaagcaaaaaaatatgatcatctcaatagatgcagaaaaggatttgaaaacaatccaacgcaccttaatgataaaaacccacaacagactaggcactgaaggaacataccgtaaaataatgagccatctatgacaaacccatagccacgatcattctgaactggtaaaagccggaaccattccctttcagaactgcaacaagacaaggatgcccactctcaccatgcctattcaacatagtactggaagtgctactagagcaatcaggcaagaaaaagaaataaaaggcatccaaataggaaaagaagaagtcaaactatccctcattgctgatgatatgattctacacctggaaaaccccaaatactctggcaagaggcttataatactgatgaacaacttctgtaaagtctcaggatacaatatcaatgtcaatgtacatttctatacacaataaccttcaacctgagagtccaatcaagaacacaatcccatttataatagccataaaaaatgaaaatccctaggaatacagctaaccaaggaagtgaaaggtctccacaaggagaactacaaaatacttctgcaagaaatcagagatgacacaaataaatataaacaattccatactcatatatcaaaaagatcaatgtcatttaaatggctatacattccaaagcaatctacagattcaatgctatttctatcaaactacaaaaactgcttttcacagaattataaaaaaactattctacaattcatatggaatccaaaaagtacccaaatcaccaaagcaatcctaagcaaaaggaacaaagccagaggcatcacattatctgacttcaaactatattataaacccacagtaaccaaaacagctgatactggtacaaaaataaacatatcactaatggaacagaatagacaacccagaaatgaagccacacacctacagacatctgatctttgataaagacaacaaaaataagcacagggaaaagaccccctattcaataaacggtgcttgggtagctggctaaccatatgcagaagaatgaaagtggacccctgcccttcaccatatataaaaattaactccacaaggattaaatatttaaatgtaagatcttaaactataagaatcctggaagaaaacctggaaatacccttctcaacatccacgttggtaaagaattcttggctaagtctccaaaagcaattgcaacaaaaacaaaaattggcaagtgggacctaattaaactaaagagcttctacacagcaaaagaaactctcaacagagtaaacagacaacctacagaatgggagaaaatattcgcaaactatacatccaataaaggtctaatatccagaatctataaggaaattaattcaataagcaaaaaaaaatcccattaaaaatgggcaaaagttataaacagacacttctcaaaagacatacaagtggccaaaaaacatgaagaattctcatcatcactaatcatcaaagaaaggcaaatcaaagcaattagataccatctcataccagtcagaatggccattattcaaaagtcaaataatagcagaagctagtgaagctgtagagaaaaggaaacacatacactcttggtgggaacaaaaactagttctgccagtttggaaagcagtttggagatttcttaaggaacttaaaaatagagctaccatttgacccagaaatctcattagtgggtatctatgcaaaagaaaacaaatcattctaccaaaaagacacatgcagccctatgttcatcgcagcactattcccaatagtaaagacatgaaatcaacctatgtgctcatcaatcatcaatggtggattggataaagacaatgtgttacatattcaacatgaaatactatgcatccataaaaaagaatgaaatcatgttttctgcagcaacatggatgcagctggagaccataattctaagcaaattaatgcaggaacagaaaaccaaatactgtatgttctcacttataagtaggagcaaaacattgtgtagtcatcaacataaagaaggaaacaatagacaatgtggattactagagggaggagggaggaaggggggcatgggctgataaactaactattgggtactatgctcactacccaagtgaaaggaaacataacccaaacgacagcatcacacaatatacccatgtaacaaacctgtacttgtatcccatgtatctaaaataaaagttgaagttataaagaaaaataagtgttagagtttatttcttggctcacaattctactccattgttatatatgtttagctgtactgaggggtctccaagatcaccctcaagtttgatgactcactagaaaaactcaccagacctataaaaacgattatactcatggttacagcttaatacagttaggagatacagattaaagtcagcaaaggtaaaaggtgcacagagtgatgcctaggaaaaaacaggtatgagctttcagttgtactcttcctccagaatcacacgaatagaactcaattcttccaaccataaggtatgacaataagtgcaaaatggtgccagccattttcagtgggagtcaatcacataagcatgaagcatccccaagactgaatttagctactcaatcttcagcccctaaccttaggagtcaagctaataccgcttggcctgaagccccagtcatagaaaaaaatatatgatttattcaccataaatcacattgttagcataaactatttggcatgggccaagtctcaggtatacaaagacactttatcaggcaggataattaaagggctcagagattatctgccaggacctttgaaatatgcagggttaggacaaccccaaatcttctgagttaaccctttattacacagtccaccccataccccttagcctaggctgtctttcagcaaaacaattctatatttctgagcatctacatttagtatagcatttatataacagatctagaaatagtatcagtatgaagaaagatctctagttatagtagataaaatatagcagtggaaggcccagcataccatggttgtgctatgctcaaaaacatttggaggagctagtgtggggtagggataaagattttaaaaacaactaatctatctcataaagccattacatacattttcatatttttgtactgatttgttacttgtttctccccttgatctaccactttaatcttacagctgcagaattatttagcctagaaattagtttatggttaactaaatccaattcttccttaggctagtcattttccattggtaatacatcctgaggaggcttaactcaatctctcaatacatttgatcatcagtatcagtaccatcctatgacttatttaataaggtggctgaatcttaccaacaataatagtgtcacactgtatagcaatatagtcatggaacaatttagtttcattcatagaacaaattagtaaggcttacgtaagttttgctatgccttcccaacagaaacagtccttgcttatatacaagatatacttatggacaagcattgttataattgttagaatgatttgattatttctggcttccatgtcaacggaggacaaagacagccaccccgttttagttttcaagcttggacagagactggtttccattgtgtgattttctacagcaggacctccccaccctcctatgggaggtcacaggtgatattcagatagcttcagtccctactaactgtactgcagaatatgtcttattctgaagctctaatggggcaagaataatttgtagtgcatcaatgcacatttacaaatgccctgagaggtctttcataagtttgaaggcccatgagattcccataagtgtgtccctttttcctcagcaactaggatgtagtgctatttccccatggttactttgaccttcatctgtaattaaaacagtcaaaaggcactgttgggtcagggtacaagccctttcccaacgttggatcttagcattatctagcattatttttgagtctacttgtttcattttaataaagcctcatcactttctcaggatgaccctcatcttttgccttcctcctagaaaagaattctctccaatctgctcattttagttcagtaatatttcctctagacttcactaaaagggaattcagcttgtcccatgatgcctgaactgacacctaatgcccctaaaaagtctgttttatgcacaaatgtagtttaattcaccatgcatgttgttggcattgtatacttatggcccaagtgcagttagcatatgtggtttttaccccaaaatgcgggttcttcatatatagattagatgaattgtagtcaaactagatctaatttagtttttagtatgttttaatgcctttcataatcttttttgtctcagggtggggccattaccccaggggaattcaagtcaccgtgtaatggctactgctttaatcccatcatgtattaattgccattctctcttttttcaactttcattttagattcaggggatacatgtgcaagtttgttacctgggtatattgcatgatgctgaggtttgggatatgaatgattttgtcacacaggtctgagcatagtacccagtagttagtttatcaaaccttgtccaccgcctacccagtagtacccagtgtctattgttttcatctttatgtccatcagtactcaatgttcagcctccacttacaacatatggtgtttggttttctgttcctgtgttaattcacttagtattacaacatccagctgcatccatgttgctgcaaagagcataatttcattctttattatggctgcatagtatttgatggtgtatatataacacattgtctttatccaatccaccatagatgggcatgtaggttgatttcatgtctttgctattgtgaatagtgctgtgatgagctataactgcatctgtcattttggtggaatgatttgttttcttttgcatagatacccagtaatgagattgctgggttgaatggtagctctatcattaagttccttaagaaatctccaaactgctttcaaactggctgaactaatttacattcccaccaagagtgtaaaaatgttcagttttctctgcaacctcaccaacatctgtttatttgtttttcatgtttgagtaatagtcattctgactgttgtgaaatggtatccagtcatggttttgatttgcattgctctgatgattagtgatgatgagcatttttttcatatgtttgttgagcacttatatgtcttcctttgagaagtgtctgtttgtgtcctttgcccattttttccatgagtttttttttcttattgaattgtttaattgccttatagattctggatattagatctttgttggatgcatagtctgtaaatattttcttccattctataggttatctgtttactctgttgagagttttgtggtgcagaagtttaattaagtcccactttccaatttttggtttttgtttttttcaattgcttttgagaacttagtcataaattattttccaaggtgatgttgagaatggtgttttctaggttttcttctaggattcttttttctttcttttttttttttttttttttttttgagatggagtctcactctgttgcccaggctggagtgcagtggcgtgatcttagatcactgcaacctccacctcctgggttcaagctgttctcctgcctcaacctcctgagtagctgggattactggtgcatgccaccacacctggctaatttttgtatttttactggagaccagatttcaccatgttggtcaggctggtctcaaactcctgacctcatgatccgcccacctcagcctcccaaagtgctgggattacaggtgtgagccgctgcgcccagctcttctaggattcttaaagttttggatcttacatttaaatctctaatcgaacttgagtcaatttttatacatggtgaagggcaggggtccatttcattcttctgcatatggctagccagctatccaagcaccattactgaattattgaatagaattattgaatagggagtcctttctccatgataatttttgttgtctttgttgaagatcaaatggctgcaggtttgtggctttatttccaggttctccattctgttccattggtttatgagtctgtttttgtaccagtatcatgctgttttggttactgttggcttatagtttgaagttaggtcatgtgatgcctccagctttgttccttttgcttaagtttgctttgactattggggctcttttttggtttcatatgaattgtagaatagattttctaattctgtgaaaaatgataatggcagtttgatagaaatagtgttgaatctatagactgcattgggcagtttggccatttaaatgatattgattcttccaatccatgagcatgggatattttttcatttgcttatattatttattatttcttttagcagtgttttgtagttctcccggtagaaatctttcacctccttggctaaatatttgcaatgtattttatttttcatgtggctgtcatgaatgggattgtgttttgagactttgctgaagttgtttattaaatctggaagtcttttggtggaatcattagggttttctaggcgcatagaatcacattgtcagcttagagagctaatttgactttctcttttcctatttagacaccttttatttccttgtcttgcctgattgtttgggctaggatctccaattctaacagctttcagtggagtctaggtttttctaaatataagattatgctgtctgtaaacagggataatttttttcttttactgttaattttcagagttttatattttatttattatgtgtagtctgcaaatacattctgtaaggttattgcttgtctttttattttcttaacagggtcttttgcagagcaaattttaagactttgatgaagttaaatttgtcaattactttttatggattgggctttttgtgtcatgtctaaaacctcataaccaagcattaagctccatagattttctcctatgttttcttttaaaagctttatggttttacatcttacatgtgattctatgaccaattttgagggcttttttttcatgtatgtggggtgtttaggtaagttaattttttttaacctgtggatatgcaactgttccatcacctatatttaaaaagattattcttccttcatttaattggttttatatctttgtaaaaaaaatcaattggctatactagtatggttctacttccggattctgtattcttttccattcatgtatgtgtccattcctctgctaatacaaatcttggttactgaagctatacaacaactttcataattgggtagaattaatttctccgactttattctattttttcaagattgactaatccattctagctattttgcctttccatataaattacagaataatctgtgtatatttagaaatatcttgatggcagtttcaagatggctgactagaagcagctagcgtgtgctactctcacggagaggaaacaaagtagcgagtaaatagtggcttttcaagtggatcgtctgggagaccacatcaggattcaccaaggaagtgagggaatcctcagagagcagagagtgaagcctggcagcagccgctcacccgggaccagtgtggagcaagagaaattccctaacatggggaaagggtgagtaagtgagagtcctcaggggatccacatggatctttgcaatcctgtgcacaggagaaccccttggcccctataggcctctagatcgacacaacatcctggagtttgtgtagacgcactgctaagggccatgtggagccccacaggccctggatccctgatcaacctggtgccagctgccatagccctgataggggctgcagtcatggtgctgaggagtggtcagactgccctgctcctcctcaccaggcaaggctcggctttggcttccagtgcaacagtctgcctccacctgaactctgcatgtgggcacactctacactcccctgggaaccactcagatggcggattgtgtgactcccattcccctgctgctccgagccaggcaaggctagctggtttgggcttcaacacagcacctctgcccctacctgaacactgtagtgggttgcagctttccattcccctggggcaaaactcacagaggtaacagataatgcctggcacctttgtgtgttgctaatagtgaagttcaacattattggataggagggaggtgcaagcatgccaggcattccacagcttccagtctccattgccccagctaagggatggcatgctctccagttaaaggcccacagcacaactgtcctgcccctgcctgaacatttcacctgcgacccagagcctttccgaaaacccacccaccacaggcctgtgatattcttctgggttcccaccacccaagaatcccaccttcccctgcctgagagtttggctggtgacccagggaccagcctgaaccccacccccaccccattacagtcagcacctgaaatctgggatagataaccccagtccagccccttcagggccatgcacactgtccagcaggccttctggaggcctgtcagctgagaaactatcaatacccttccagtgctgttggcacctgaccaatttcctcagggcctgaggttgggcctacccaaccagcaaacaccaccatgaccaacaccgacctgcacggacccaaaggtggagaccttccttctcaaaaagcagcagtaatgccccatcatagaataagtgagccttaaagctatctgtatcaggttgagtgatgaggttataccctgaacaactctcatggagaatcataaaacaagtgttccctgtggccctcaaccacattgcagtccagagatagactatagtgtgcatctgaactaggagtcatgagccctgaaacagggtgtgataaggaaacagatcacatttctacctacctaggatggggagctggtgcagtcttctcgcccacaagcccctacagagacctcagtgcaggagttgctcccagccacgctcatcagagctggtgcctgtgcttgccattggtatactaatgggcaagccaggggcaccagctcttctcagctctgtcccaccatccccacagaacaagaagctcagtacatcaggcacccccactgtccagcccttcacctgaaacaactgagagcccctaatagtaaaaaaagatcagatctatacccatctgtttatgggacagctggctgttacttgcaaatgtcatctaccagtctataggtcaaactggacagcccatcaaaaaacctgctggtagaagtgtgtaggactatagaaacaaagccaaaagccctacccaacacaatcccctccagataagaaggaactagtataagaattctgctgtcatgaaaaatctgaatgtgtgacaccaacaaggttcactctagctctccaggagtggtcctagccaaaatagaagctgagagatgacagatggagaattcaaagcatagattgcaggaaaattctttgagattcaagataaggttgaaaatcaacacaaagaaacctgtaaagcaatccagagaataaaggaagaggtaaactcttaaaaataaatctatcagagctactgaaagtgaaaaactcacttaagacattccgaaattcaatgaaaagttttatcaatagactagatgtagcagaagaaagaatttcagagcttgaagatcagtctttcaaactaacccagtcagacaaaataaagaaaaagttattttgaaaaatgaaccaaatcttcaagaaatatgggattatgtaaagtgaccaaacctatgaattactggcattctcaagagagaaagaggaaaaagtaaacaacctagaaagcatatttgagggaataattcaagaaaatttcctttatcttgctagagaggtagacatccagatacaataaattcacagaacacctgcaagatgctatacaaagtgaacatcatcaagacatagggtcatcagacagtctaaggtcaattctaaagaaaaaatcttgaaggcagcctagagaaaagtgtcagatgagttacaaaggtgagcccatctggctaacagcagacttatcagcagaaaccctacaatcccaaagagactgggggcctatttaaagaattctcaaagaaaagaaactccaagcaagaatttcataccctgccaaactaagctttataagtgaaggagaaataagatctttttcagacaagcaatcactaaggcaatttattgccactagaccagccttacaagagatccttaagggagttggagttctaaacataaagatggaagaacaatatctgccaccacaaaaccacacctaagtacatagcacatagaccctttaaagctattacacaataggaactataaagcaaccagcttacaatttcatgacaggatcaaaatctcacatatcaatattaaccttgaatgtaaatggtcttaacaccccacttaaaggcacagagtggcaagttggatcataaaataagacccatccatctgttgtgttcaagagacccatctcacatgtaatgactactacactaattttatcgggtttttttccccattgcttataagtttcattttatggtatgttattttgattgtatgccaaacattgggtaaatgggttttggagactccaagtgatgttatcttcaaacataaaaggtcctccctttctccagatagcaaagagataaggacatgactaattcaatataacaaggcattaagctggttcagggctgggtttcagtattagtaatgattccaaccacatctagtttggtcctgtttctcaggaatagccctccaggctttttcttcagggtctgtttggtctcagtatcttcagcccaaaaaaacaatgagggaattctagctctgttctttatggttttcaaacattgctcttcagcctcctgattcaggcacttctgtaatgtctcaagggggagactatctgtgtgcttgaggtaggctccatatcactatcatatctgtttcctaagcactacaagagtacaagaaatctcttactgcctttcggaagtttcagctgagctttccaacctctcacaaagctctacttttccaatgctccattggggggactaaaatttggggcacctgaaattccaatttgtaattcctagaatctctgctacttctgctgattcaattacctcccagaaagcctttctttctgggccaagcctgatttcccgtctgtcccaaactgacaaaggcacccatgggggaaatggctggcaattattgacctactccagaaacagaaagcctgttctgttctctctttagaatatcaactcttctagtaccagtaatttctctggttctctaatgccttggaaatattattttaataaaaatcaagcttttctaggttttgtatcaaaggcattgcttttctgtgatttactgatttctccccaagaacagaacttctcaggcccatttaatcttaacttaattgctgttatgtttggctttaaattggccattgtttaacgtgatttacattttcctgagttttctatatttctcttttttctcctttcttttaatctttctgtataaaccagatgttctttaattccattttcctccccactagtttttaatgtattctccttttctattcatcatcactctagaaatgaagacatacattcttaacctatcaatatctaatattaaccaaaaatgtgtatttctcctcagacaatgcatggaatacaactccatttcacctgcctccagtttatattctattgctttattttactttcatataatactaagacaatattattgcatgcgtgacaattataggtagttctattttctgggtgactccaacaagttatcattataaagtaacccattttcctctaagataatttttgccttaaatactattttgttcaatactaagaagtaagataacttccttttgttggtatttgcatgttaagtttttttcccatatttccactttcaatcttctccgtatcttgtttttacatttatctgttgtaaatagcatctaatttttcatccagtctagcaactagagttaatccataaatttaccaatctctgaataatatatggaacatagaccactttaattctatttaacgctcccaattgattctattttcagaattttgatatttaattatgtttttaatcttataaaacatctttatttaattctgccagtttaatccacttttatccctttttttgttgcttcttcatcacatactttccatgtgtggtcatttttttaaactaaagaacatcctttagaatttcctttcatgagatctgctatctctatctgaaaaggttgtatttatattttcttcttaaaatatttttgtggatatggatttctaggatgacatttactttgaaaaatacgttgaagagctcagtccattggattatggcttctattgtttgtggtgaaaaatcacctgtcagtgtaacaattactctatcaaaagtatggtttctgtttttccctctgactgtttcccacttttctctttgtcattttatctagatgacaattcttatttattttctagaatagtatttcttagattatttctgaaaaaaaagaagatttattatcttttcaaatttatgtagctttttgtaattctttttctttaattttctttctccttctctttgaaaatcttattaatcagatattggctctcctggattgacactctgtgtcttatatattttgctcatactttccacttgtttttagacttcaaagattttctcactttatcttcaaatgtgcctgctaaacaatcatttttctaatttccaaaagtttactacttctccttacatagcatgatattattgctttatggatggaatacactcttgaaactccagcccctaaataatagttattctaatgtgcctttcttcatttattttcagtcatgttaaagattttctcaaatagatagccagcctagattgtttattcatattttacatatatactgagccattttatgtgtgcaaacttgtccacagcttttgttttaaaatgcttgaactgtgaagatagaaaagacatgtttgctggaatgcataatactgaagtttacttctcatagtctttctttagaagttatcgcctaggcagaaaaagaaagtaactaaaaaaaaagaaaacacaatttccaggtatatctgtgccaactcaggtgactagtaaaacaaaattctaagatgacatctgtatagcctacataggaagcaaccagttcacattatagaaggaagaatgaatgttccagagacaaaatatagttacaatacaccctcatctattgtagtaaaaaaaaaaaaaagctgaagtctaaattacacaaatgtagcagcataatactattaaataataagtaatttaatattctatttcatggcattattttacaggagcactatttgatcatcttctctttatcacacatacttcttccatttatcttacagtatctttacataaacactaaaatagttatactcagattgtacacttttgaagggagttagcctatttgtgtcaattatttactaaaacaaagctaaataacagcaacaaaaaagccttgttggaacagggaccaggggaatgatcagagcaataagtagcttgcatgaaaatattattaactctgaatactttctcattaacattaacagtgtgtcctgcctgtatatttaatccatttagaattaaactattaatatattgtgtcctaggatggcagagttattaagcagcccctgtatgctccaggggatataggttgatattcttcagctgtcaaaattcttcagctgtcaaaattcttcagctgacttaaatcagcagtagtggcgtttatcaccagtcaacaaagttcttctatccttcacttctttagcctactcatctaatggatgttggcacgaacatgaagtttctctcctaaatatctatgatgttccacaaatcatgggatatgcctgcaggctgccagcacaatcagatcttcatgttccaagaaagggatcattagtttggccctgcaagatgtgccacctttcttggagaactgagtgtgccacatgcaatctgctgaggcatgaacgtgctcttggcatttctgtttatttgctccttattacactatattgtgtcagaatgatggtttgggttcaacagtatgctcacgtaagccactattccaaacttcctaaacgcacagttgtggaatgtgacacaattgttggcaatgatatttaaacaggatatgtgtttttggtggggtctctgggaaaaattactaaagggaggggtggagtgatccaaatattcaagtggtagacacccacttgactttggccttccacttcctcctgtttggaatatggtcataatgctggaggtaatgctgccatctataacaatgaagcaaaaacactggataacagtatgtgaacagaagagtagagggtgactagcatggtgaagctgttatataatttctggactttatgttatgtaagaaaaataaaacctgaatttgtaataaatgaacaaaatgcctttttcatgtttttctgtttcatattacagcctattatactttctaactggcacatcatggattatagatagaatgtgatttaggattaaactctcttaagtttaaaatgtgtagttttcttctctcttgttcattctcttactgcctccagttcatttcagagcatatgaaaagagacaataagggacttttagctggaagtttacactacattactgagtaggaggaaagtagcttaatagttctataaagagtatcattacaattttaaaaataaacaaaaacataaattatatacctgtagtctatcctgaaaatatttcctgaagtcacagatttggagtattgtcaacttgtgcataaacttcatgagaccatggactattgtttttctcactgctttattcctagctccttgatcagaacaggcagagagaagatgcacaataaatgaataaatataataaatgaatgtatcctttattacctacgcaaacacatgcacacaaacacatctatgaagttttacatgatagtataaacactgctttggtggaggaagttactgattttcttttagcttgttttccactttatttttctttaccaaataagtttcacttttgctattagaatataataaataacagaaaccacaagaacaaagtagcagctgaaaaaaagaaatggaaaattcttaattcatatatgattgcctctgtgaaacaatgaaaagtggtcatccaatttcagtttgaacacttttttcctcataaagtcatcctatacctttactcaaatttagttttaggtgcattaggagttaaaaataaaacataaacccatttaagaaccaagagaattagtaaggtaaattactttggtaaaatgcccaagttccaggctctgctgaagagaaattattgattcaaccttaaaatatttgaagtctctggtaaggtgactttagctaaagctgcaaccagctcaactacaaatcagactgactcactactctagcaacttgacagaagaacaatactagacagaatattaattaccttttggaggtaattatttattgaaaactctactgaacttctatatgtctggcataaaataaaggttatgacatatttttaaaaagaaagaagacataactcattgtccagagaggaaatgatcaacacccagccaatggaattatcaaccagaaactcaaagtaactctgatagaaatatgctagagaatatagtgggaaaataaacagtactggtgtttactgataaaatagagaattttatctatgagccaaaacaaagtaatacaaattaaaaattcaatatcagaaatggataattcattcaatgggctgaacagcagactgggagaagcaaagaaaacaatcacttcacttgaaactcaaatgaacatttgaatagaaatttcccaaatgaacacaaacacaaaaaagtaaagaaaaattgaatacaacatcagagagatgtgagatattatcaaataattcaacatggatttaattggctcccaagaagaagggaaggagagaatgaagcagaagaaataagagctaatagcctcctacatagcaaaattgatccaagaacttcagcaaggtctaattaggacaaattcaaagaaaatttctagacatagtggatttcaaactgctgaaaatcaaagacagagaacaaatcttaaaagtagccagagaaaaaggacatgttatctaggaaggaacaatgacacaaatgatgctgagctatttccagaaaaataaaaacagcgggtgacatcagcaagatggcagaataggaagtcccagatctcatttccacatggaaacaccagtttaacaatagatgaacaaaaatatctttattagaattccagaagagaaggaaagaaattcaaagatttctcataagaaacttcgaagggcaggaggaagtggcacaatatttttaaagtgcttcaatagtaagtctcaatccagatatctatgtccaagaaaatatccttcaagaataaggaccaaataaacacattctcaaatgaaggaaaactgaaaaaaaaagggggggtcactagtaggtatacctaaaagaacagctaaaggaagtcctccacagtgaaagaaattatttttttttttttttgagaaaggagtcttggaacataaggaaaaaagaagagagaaaacaaaaacatcagaaatgcaataaactttttacctactttttagttttctaaattatttttgacagtaacagcaaaaattatccctctatagtgattctcagcataggtagaaaaaatatttaagtcaatgatattagaaatggggggttatcatagagatataaagggagataaaatctttatctgatgtggttaaatgatgtaccagtagactgtaataagttatggatatataatgtagcacagacaacaatcactacaaaagctatacaaagagatacacttgaaaacactatagatgaatgaaaatggaattctaaattatggaaaaatatctcacaaaatggcaggaaaaataagacaaagaagcaaaaaggaaacaaaaacaaaatgaaagatttaagcattaatatatcaataatttaattaaatttaaatgatctaaacacacaaatttaaagatgaatattggcaaagtatgtttttagatgacccagtaatatgctatatacaagaaactcacatcaaatataatgatataaataggttataagtaaaagaatggaaaaagatataccatacaaatattaataaaaagtttgcaggagtgactatattaatgtcagataaagtagacttcagaacatcaaaaaaattaggatgattttttgtcacctttacatagtgacaaaaggtccaatacaccaaaaagatgtggcaaacttaaatttgtgtgctccaaaacacaaagctgcaaaatatgtgaagcaataacagagagttaaaagagagaaataagcaaaaacacagtcgggatatcaccacccacttctttccagaattgatagaacaacaagaaagaaaatcagcaacagcaatagaagagctcaacaacattaactacaggatccacgtggcatttaaggagcatttccactcaactagagcagagtaaatattcctttcgagctcagagagtgtatactaagatagactatatcctaggcaaaaaaaaaaagaagaagaagaaaaaaggatattcaactaattaaaaagaatttaaactgcacaaagtttattctctatatgattgacacagtgaaatcaaactaggaatcaataccagaaataaaacacaaaaatctccaaacacctggaaattacacaacatgcttccaagtcaaagagaagtctcaataagaataaaatatacatagaattaaataaaaatgaacatataacatattcataatttgtgctaaagcagtgccaagagagaaatttagaacaacaaatgcttatattacaaaagaagaaaaatgtcaaatcaataatcttagctctcacctgaattagaaaaataagagcaaattaaatgcaaagtaagcagaagaaagaacataataaagataacagcacaaatcaatgaaattggaaacagaaaaacaatagagaaaatcagtgaaatgaaaagctgcttctttgaaaagatcaataacattgacacacttttagcaagactgacaaagaaagacacaaatttccagcatgcggaataaaacaaagaatatcactaaagaccctatggaaataaaaatgataataagggaatacgataacctttttttttttttttgagacagagtcttcctctattgcccaggctggagtgcagtggcacaatctcagctcactgcaacctctgcctcctgggttcaagagattctcctgcctcggcctcccaagtagctgggactacaggcatgggccaccatgcccagccagtttttgtatttttagtagagatggggtttcaccacactggccaggctggtctcgaactcctgacctcatgatctgctcgcctgggcctcccaaagtgctgggattacaggcatgagccaccgcgcccagccaactaactctctatacattgatttacttttttattttaaaatatccttgcattcccagtagaaaccctagttggtaaaaaaaaattattgtttgtaaacccttcttctttgatgttacgcatctacagctaaagatttccccttaagcaaggcaggagctgcatttcacactttataaaatgttgtattttactatcttgccgttcaaaatacatattaattattcctataattttatctttaacacatggcttttacataattttaaatagtactttttaaattttaaattaaattttaaatacttttaaataataaaagtatgctagttaatttcaaaatattatgtttcttaacatcttatttttattggtttccaacttaatactgatgtttttctagatatcacatttttaattgattgctattttgcaattatttctgcaatattttagtgttttgacatttatagggacttctttaaagaatcaacactgtccatctcagtgagcattccatgtgcatgtgaaaaaaaaacgggtattctgtaattattggaggtagtgttctatacatgttaattggattgaggtggttattcagatttgctacattcttttttttttttttcgagacagagtcttgctctgtcaccaaccaggctggagtgcagtggcacgatcttgggtcactgcaacctccacctcccgggttcaagtgattcccttgcattagcctcccgagtagctgggactacaggtgcgcgccaccatgcccggctaattttttgtattttagtagagacgggatttcaccatgttggccaggctggtcttgaactcctgacctcgtgatctgcctgcctcggcctcccaaagtgctgggattacaggcatgagccaccacgcctggccatttgctacattcttactaaatgtttggtctagttatgctatcaataaccaacagtgaatgataaaatttccaactgattgaagatttttctgttttcaagttacttttgtccatctttacttcatgtatttttaagttatattattagatacatcatgtctttctaatgaattgaccctttcatcattatgaaatggccttcattatctctagtaaatactgcttgccttggagtcaaatacatcagatattaatataatcactccacaattaacaaagccatcaaaagtagcttgtatatccaacttattctctgtatcgatttctttcacttttggcctgaaaaatctttactcactgaaaagcaaagaatataaagaaaaaaaaaaggtaaagaatccaaggactgtgggaaaactgcaaaaggtgtaacctacatgtaatgggaataccagaaggagaagaaagagaaaggaacagaaaaaaatatttaaaacaacaattgaaaatcttcagtgggagtataattagttcaaccattgtggaagacagtgtggtgattcctcaaggatctagaaccagaaatacctttgacccagcaatcttattactgggtatatacccaaagaattataaattgttctactataaagacacatgcacacatatgtttactgcagcactatttacaatagcaaagacttggaaccaacccaaatgcccaccaatgatagattggataaagaaaatgtggcacatatacaccatggaatactatgcattcataaaaaagaatgagttcatgtcctttgcagagacatggatgaagctggaaaccatcattctcagcaaactaacacaggaacagaaaaccaaacaccgcatgttctcactcataagtgggagttgaacaatgagaacacatggacacagggaagggaatgtaacacactggggcctgccaggggtgggggggcaatgagaaagcattaggacaaataatgcacgtggggcttaaaacctagatggcaggtttataggtgcagcaaaccaccatggcacatgcatacctatgtaacaaacctgcacgttctgcacatgtatcccagaacttaaagtaaaataaaaagaaagaaaaaaaaacttgagtaaaatgaaaaagaaaaagaaaattttccccaaattaatatcaaacatcaaaccacagatccaagaagctcagagaatactaagtaggataaatgcaaaaaaaaaaaaaaaaaaaacctaatcatgtcatattcaagctccatgaaacaaaatataaagaaagaatcctgaaagaagacaaaggaaaaaatcttatcataataatagtgctcatttctccaacaagacataacaatccttaatgtgtatgtgtctaaaaacagagtcaaacaatgttttgatttgcatttccctgttgactagtgatactgagcatttttccatgtatatgttgaccatttgcatgtcttttgagaatgtctatttttgttctttgctcatttttcaaggatatcatttgtttttgtttctgttttttttgctttcagttgagtcccttgtttattctagtttgatacagtcccatttgtctgttcttggttttgttgcctgtgcttttaaggtcttaaaatatttgcctagaccaaagtcctggagtgtttcccctatgtcttcttctagtagttttatggttttgggtcttaggtttaagtctctaatctattttgagttgacttttgtatatgatgatagataggggtctagtttcatttttctgcatataaatatccagttcccagcaccatttattgaagagtgtgtcctttccccagtggatgttcttggtgcctttgttgaaaatcagttggctgtaaatatgtgaatttatttctggattctttattctgttccattgatctatatgttcatttttataccaacaccatattgttttgctataagtactatagccttgtaatatattatgaaggcaggtagtgtgatgccacaaactttgttcttttgtctcagaattgctttggctattttggctcttttttggtttcatacacattttaggattgatttttctatttatgtggaaaatgtcattggtattttgataagaattgaattgaatctgtagattgttttaggaaatatggtcattttaacaaaattgattgttccttttcatgagcatgggaggcatttccatttgtttgtgtcgtcttccattcctttcatccgtgtcttggggtattccttgttgacatctttctcctccttggttaaatttattcttaggtattttttgtagctattgtaaatggaattgccttcttgatttcttttttggctagttcattattggcatataaaaatgctactgattttttagcattgattttgcattctgcaactttactgaatttgtttatcaattctaagaggtttttggtggagtcgttaggtttctttaaataaaattatgtcatctgcaaagagggataagttagtttcctgtttcccatttagatactgtttatttctttttttgtctaattgctctatctagcacttccagtactatgttgaatgggaatgatgaaagtggacatcttcttgtcttattccagttcttaaaggaaaggcgactcttgggggaggagccaagatggccgaataggaacagctccggtctacagctcccagcgtgagcagaagacggcgatttctgcatttccatctgaggtaccgggttcatctcactagggagtgccagacagtgggcgcaggccagtgggtgcgcgcaccggcaccgtgcgcgagccgaagcagggcgaggcattgcctcacctgggaagcgcaaggggtcagggtgttccctttccgagtcaaagaaagaggtgacggacacacctggaaaatcgggtcactcccacccgaatattgcgcttttcagaccggcttaaaaaacggcgcaccacgagactatatcccgcacctggctcggagggtcctacgcccacggaatctcgctgattgctagcacagcagtctgagatcaaactgcaaggcggcagcgaggctgggggaggggcgcccgccattgcccaggcttgcttaggtaaacaaagcagccgggaagctcgaactgggtggagcccaccacagctcaaggaggcctgcctgcctctgtaggctccacctctgggggcagggcacagacaaacaaaaagacagcagtaacctctgcagacttaaatgtccctgtctgacagctttgaagagagcagtggttctcccagcacgcagctggagatctgagaatgggcagactgcctcctcaggtgggtccctgacccctgacccccgagcagcctaactgggaggcaccccccagcaggggcacactgacacctcacacggcagggtattccaacagacctgcagctgagggtgctgtctgttagaaggaaaactaacaaacagaaaggacatccacaccgaaaacccatctgtacatcaccatcatcaaagaccaaaagtagataaaaccacaaagatggggaaaaaacagaacagaaaaacgggaaactctaaaacgcagagcgcctctcctcctccaaaggaacgcagttcctcaccagcaacggaacaaagctggatggagaatgactttgacgagctgagagaagaaggcttcagatgatcaaattactctgagctatgggaggacattcaaaccaaaggcaaagaagttgaaaactttgaaaaaaatttagaagaatgtataactagaataaccaatacagagaagtgcttaaaggagctgatggagctgaaaaccaaggctcgagaactacgtgaagaatgcagaagcctcaggagccaatgcgatcaactggaagaaagggtatcagcaatggaagatgaaatgaatgaaatgaagcgagaagggaagtttagagaaaaaagaataaaaagaaatgagcaaagcctccaagaaatatgggactatgtgaaaagaccaaatctacgtctgattggtgtacctgaaagtgatgcggagaatggaaccaagttggaaaacactctacaggatattatccaggagaacttccccaatctagcaaggcaggccaacgttcagattcaggaaatacagagaacgccacaaagatactcctcgagaagagcaactcaaagacacataattgtcagattcaccaaagttgaaatgaaggaaaaaatgttaagggcagccagagagaaaggtcgggttaccctcaaagggaagcccatcagactaacagcggatctctcggcagaaaccctacaaaccagaagagagtgggggccaatattcaacattcttaaagaaaagaattttcaacccagaatttcatatccagccaaactaagcttcataagtgaaggagaaataaaatactttacagacaagcaaatgctgagagattttgtcaccaccaggcctgccctaaaagagctcctgaaggaagcgctaaacatggaaaggaacaactggtaccagccgctgcaaaatcatgccaaaatgtaaagaccatcgagactaggaagaaactgcatcaactaacgagcaaaatcaccagctaacatcataatgacaggatcaaattcacacataacaatattaactttaaatgttaatggactaaattctccaattaaaagacacagactggcaagttggataaagagtcaagacccatcagtgtgctgtattcaggaaacccatgtcacgtgcagagacacacataggctcaaaataaaaggatggaggaagatctaccaagcaaatggaaaacaaaaaaaggcaggggttgcaatcctagtctctgataaaacagactttaaaccaacaaagatcaaaagagacaaaggcggccattacataatggtaaagggatcaattcaacaagaggagctaactatcctaaatatatatgcacccaatacaggagcacccagattcataaagcaagtcctgagtgacctacaaagagacttagactcccacacattaataatgggagactttaacaccccactgtcaacattagacagatcaacaagacagaaagtcaacaaggatacccaggaattgaactcagctctgcaccaagtggacctaatagacatctacagaactctccaccccaaatcaacagaatatacatttttttcagcaccacacaacacctattccaaaattgaccacatagttggaagtaaagctctcctcagcaaatgtaaaagaacagaaattataacaaactatctctcagaccacagtgcaatcaaactagaactcagaattaagaatctcactcaaagccactcaactacatggaaactgaacaacctgctcctgaatgactactgggtacataaggaaatgaaggcagaaataaagatgttctttgaaaccaacaagaacaaagacacaacataccagaatctctgggacgcattcaaagcagtgtgtagagggaaatttatagcactaaatgcccacaagacaaagcaggaaagatccaaaattgacaccctaacatcacaattaaaagaactagaaaagcaagagcaaacacattcaaaagctagcagaaggcaagaaataactaaaatcagagcagaactgaaggaactagagacacaaaaacccttcaaaaaatcaatgaatccaggagctggttttttgaaaggaccaacaaaattgatagaccgctagcaagactaataaagaaaaaaagagagaagaatcaaatagacacaataaaaaatgataaaggggatatcaccactgatcccacagaaatacaaactaccatcagagaatactacaaacacctctacgcaaataaactagaaaatctagaagaaatggatacattcctcgacacatacactctgccaagactaaaccaggaagaagttgaatctctgaatagaccaataacaggagctgaaattgtggcaataatcaatagtttaccaaccaaaaagagtccaggaccagatggattcacagccgaattctaccagaggtacaaggaggaactggtaccattccttctgaaactattccaatcaatagaaaaagagggaatcctccctaactcattttatgaggccagcatcattctgataccaaagccgggcagagacacaaccaaaaaagagaattttagaccaatatccttgatgaacattgatgcaaaaatcctcaataaaatactggcaaaccgaatccagcagcacatcaaaaagcttatccaccatgatcaagtgggcttcatccctgggatgcaaggctggttcaatatacacaaatcaataaatgtaatcccgcatataaacagagccaaagacaaaaaccacatgattatctcaatagatgcagaaaaagcctttgacaaaattcaacaacccttcatgctaaaaactctcaataaattaggtattgatgggacgtatttcaaaataataagagctatctatgacaaacccacagccaatatcatactgaatgggcaaaaactggaagcattccctttgaaaactggcacaagacagggatgccctctctcaccactcctattcaacatagtgttggaagttctggccagggcaatcaggcaggagaaggaaataaagggtattcaattaggaaaagaggaagtcaaattgtccctgtttgcagacgacatgattgtttatctagaaaaccccatcgtctcagcccaaaatctccttaagctgataagcaacttcagcaaagtctcaggatacaaaatcaatgtacaaaaatcacaagcattcttatacaccaacaacagacaaacagagagccaaatcatgagtgaactaccattcacaattgcttcaaagagaataaaatacctaggaatccaacttacaagggatgtgaaggacctcttcaaggagaactacaaaccactgctcaaggaaataaaagaggatacaaacaaatggaagaacattccatgctcatgggtaggaagaatcaatatcgtgaaaatggccatactgcccaaggtaatttacagattcaatgccatccccatcaagctaccaatgactttcttcacagaattggaaaaaactactttaaagttcatatggaaccaaaaaagagcccgcatcgccaagtcaatcttaagccaaaagaacaaagctggaggcatcacactacctgacttcaaactatactacaaggctacagtaaccaaaacagcatggtactggtaccaaaacagagatgtagatcaatggaacagaacagagccctcagaaataacgcccatacctacaactatctgatctttgacaaacctgagaaaaacaagcaatggggaaaggattccctatttaataaatggtgctgggaaaactggtagccatatgtagaaagctgaaactggatcccttccttacaccttatacaaaaatcaattcaagatggattaaagatttaaacgttagacctaaaaccataaaaaccctagaagaaaacctaggcattaccattcaggacataggcgtgggcaaggacttcatgtccaaaacaccaaaagcaatggcaacaaaagacaaaattgacaaatgggatctaattaaactaaagagcttctgcacagcaaaagaaactaccatcagagtgaacaggcaacctacaacatgggagaaaattttcgcaacctactcatctgacaaagggctaatatccagaatctacaatgaactcaaacaaatttacaagaaaaaaacaaacaaccccatcaaaaagtgggcgaaggacatgaacagacacttctcaaaagaagacatttatgcagccaaaaaacacatgaaaaaatgctcatcatcactggccatcagagaaatgcaaatcaaaaccacaatgagatatcatctcacaccagttagaatggcaatcattaaaaagtcaggaaacaacaggtgctggagaggatgtggagaaataggaacacttttacactgttggtgggactgtaaactagttcaaccattgtggaagtcagtgtggcgattcctcagggatctagaactagaaataccatttgacccagccatcctattactgggtatatacccaaatgactataaatcatgctgctataaagacacatgcacatgtatgtttattgcggcattattcacaatagcaaagacttggaaccaacccaaatgtccaacaataatagactggattaagaaaatgtggcacatatacaccatggaatactatgcagccataaaaaatgatgagttcatgtcctttgtagggacatggatgaaactggaaatcatcattctcagtaaactatcgcaagaacaaaaaaccaaacaccgcatattctcactcataggtgggaattgaacaatgagatcacatggacacatgaaggggaatatcacactctggggactgtggtggggtgtggggaggggggagggatagcactgggagatatacctaaggctagatgacgagttagtgggtgcagcgcaccagcatggcacatgtatacatatgtaactaacctgcacaatgtgcacatgtaccctaaaacttaaagtataataaaaaataaataaataaataaataaataaaaaaggaaaggctttcagcttttcttcattcaatatgatgttagctgtgtgtttgtcacatatatgacctttatttattttatttattttatttttttgagacggagttttgctcttgttgcccagggtgtagtgcagtggcacgacctcagctcactgcaacctctgccttctagtttcaagtgagtctcctgcctcagcctctcgagtagctgggattacaggggcccaccaccacacctggctaattttttttgtatttttagtagagacagggtttcatcatgttggtcaggctggtctcgaactcctgacctcgtgatccgcctgcctcagcctcccaaagcgctgggattacaggcgtgagccactgcgcctggccatatgacctttattatgttgaggtatgttccttctgtgcctagtttgttgagtttttaatcatgaagtggtgttgaattttatcaaatgccttttcctgcatctattgagatggtcatattgtttatgtccttcattttgttgatgtgtcatgtttatcaactggcatatgttgaatcatttttgcttctctgggataaatgccatttgattatgatatattacctttttgatgtgctgttggatttgacttgctagtattttgttcaggatttctgcaggatttcatcagggatattggcctgtagcttctttcgttttgttgtgttcttgtcaggttttggtatctgagtaatgctggcctttagaatgctatagggagaattccttcttcaattttttggaacagtttgaggaggattcatgttagttatttatacatttggtagaacttggtaaaccagtgaatccttctgatcctgggcttttcttcagagattttttattacgaattcaatcttatcacacattattggtctgttcaggatttctgtttctttttgatttaatgttggtggctggtatgtgtgtgggaatttaccttttcccctagattttcctgtcagtgtatacttgttcataatagtctctgatgatcttttgtattctgtgatatcatgtgtgatgtctccttttttcttttctgattttaacacacaaaagtataaatcactggtacagcaaatgcataaatgaggaaaagacccaaatgttaccactacagaaaaccactaaaccataattataaataagagagaaaaaaaaggctatacaaaacaaccaaaaactaattaccaaaacgacaagaaaaagtcctcatatataaatagtaagtttgactgttaagtggattaaatattccacttaaaacatataggctgtctgaatgaattttttaaaaaagtgacccagtaatgtaatgcctacaagaaactcacttcaactgttaagacacatagactgataataaagggatagaaaaagatatctcatgcacacagaaaccaaaagcgagcaaagagacgatggcagtacgttcaggtaggagataagcttccatgacctcagctgccaccattccccacaatgccccagctacccaagagaccctgagcccactcaactagtacattacttgtacaagtagtacgttactactatagctggcatttgagagagccactacagtaaagctatttgcaaccaaggaaatcataaaaagtctacataactcctcgacacgcccatcagggctaatgattgtggttgccattgggaaacctgagggcaagcctgccccatcgagctgtgcccaactttgcccccactttggggctgagaatggagcccatgccactgtgcattccacagacagaccatttcctgagacaatactgtttctcccagtaaacaaagatcaaatataaactccctgctatcaccgcatccagctcttaactgcaagtgccacctactggcctggaggtcaaactgcacaacccgatagaagtgttgacataagcgtacagtgctcgagaaaaagataagcgtctcaggacctctgccactcaagatctgcaggagactgtgagcctcatcacatgcctagtacatcactactacaactggcatttgagaaagtcaccgcatgaaggctatttataaccaaggaattcatacagagtatatgccattctccccatcattaccacaagtgctggtgtttgtgcctgccaatgagctatttgaaggaaagtttgacagtttagctccacccagctttatcctccccttaggggctgagcagggagctcaggccagtgtatattccatagactgtcccttgcctgaggcaacagagagcttctccccgtaaacaaagatcaagcatacacccacctgcttctgcccagattttattcataagcaccacatagtagcctggaggtctaactacacaacccagtaaaaaactggcttacacaagtgcacagcacggggaaacaagttaagcttcctaagacttctgcactctagccctgcaggaggcagtgagcctagcccagcacatcactactacaaccagcatttgagaaagccaccacacaaaggctatctataatcaagaaactcatacagactctttgccactgaaagcacccagaaccaaggccaaataaccctacacaatgtatattataatcacatcctcaagggggaaaaagtcctgaccaaatgaaagtaaatttaaaaataagaacagatagttgatccaaatgagaaggaacccaagaaacaattctggaagtataaaaaaaagagtgttacaacaccccaaaggattgcactaactcttccacaatgaaccctaaccaaaatgaaatctttgaaataccaaagaattcaaaatattaattttaaagaatctcagtaaggtccaagagaaagtaaaaaatcaatacaaatcagaaatataactcaggatatgaatgaaaaatctactaaagagatggattttttaaaatagtttttttgttgtttgtttgtttgtttgttgttgttgttgttgttgttgttgagatggagtcttgttctgttgcccaagccagagtgcagtggtgcgatctcggctcactgcaaactctgcctccagggttcaagtgattctcctgcctcagcctactgagtagctggaattacaggtgtgtgccactacgcccagataatttttttttttatttttagtagagacaaggtttcaccctgttggccaggctggttttgaactcctgacctcaagtgatctgcccaccttggcctcccaaaatgctgggattacaggtgtgagcccactgtgcccagcctaaatagttttttcaaatgaacttctgtaattgaaaaattcatttaagaaattacaaaatatagttgaaagctctaacaatagactaaaccaagcagaagaaagaggttcagaacttgaagacaagtctcttatgaattaacccagtcagacaaaaataaagaaaaaaattttaaaaatgaacagagctttcaagaagtatgagattatgtaaagtaactgaacctatgagtcacaggtattcctgaggaaaaagaaaaagtgagaagtttggaaaaactatttgaggaagtaattggggaaaacctctttagtcttgctagagatttagacatctaaatgaaagaggctcaaagaatgccaggaagatacattgcaagacagacttcatcaagatatgtagtcatcagactatctaaagtcaacatgaaggaaaaaaattctaaaatcagcaagagaaaagcatacagtcatctataaaggaaatcccatcagaataacaatgggcttctcagcagaaaccttacaagccagaagagattggatctaatttttggacttcttaaagaaaaaaaaacctgtcaaacacgaatgttatgccctgctaaactaagcatcataaatgaaggggaaataaagtcaagtctttcctgacaagcaaatgctaagataattcatcatcactaaaccagtcctataagaaatgctcaaaagaattgtaaaagtcaaaattaaagttcaatactcaccatcataaatacacacaaaagtacaaaactcacaggttttataaaacaattgagactacagagcaactaggtaaaaaattaacattacaacaggaacaaaacctcatatatcaatattaactttgaataaaaagggattaaattcccccacttaagagatatagattggcagaacagatttaaaaacatgaactaactatatgctgtttacaagaaactcattaataaagacatgagttcaggtaaaggggtggaaaaagatgttctacgcaaacagaaaccaaatgagagaaggagtagctatacttatatcagataaagcacactttaaatcaacaacagtaaaataaaacaaaggaggtcatcatacaatgataaaaagatcaattcagcaagaagatataaccatcctactaaatacatatgcacctaacacaagactacccagattcataaaacaaatactactagacctaagagggatgagaaattacctaattggtacaatgtacaatattctgatgatggttacactaaaagcccatactttactgctactcaatatatccatgtaacaaatctgcgcttgtacttctaaatctataaaaaaattaaaatttaacaaaagtaaataaaacacatagctaaaactaaaaaagcaaaaacaaaaactatgctaagtattggtaaagatgtggggaaaaaagtaaactctcaaatattgctagtgggagtataaattgttttccactttggaaaacaatttggtaatttcgtttttttttttttcttttctcttttttttttttttttttttgcatgccagaaaaaaatatttacagtaactatggaacacaaaggtttattacatccataattaacatggaacatttacttatcagtttgacaaggacaacactgagacctcttaggacagagagaaagggcaattttcaaaggaaaaaagcatagtatatgcatatttaataagtaaaacatacacataccctgtgactcagccattgtacatctagctgtttatccaagagaaatgacagcatatggctacacaaagagttgcacacaaattttcaatggcagttttatttgtaatagctaacatctgaaaacaatcataatgttcattagggggtaaatggataaatgatcatatatgcataaaaagtaatacaagcaataaaaaggaatgaactattggtacacgaaacatatatgattcaaaataattgccttggatggaaaaagacaagcggaaaagtatacatgctatattacttcatttatgtaatattcaagagaatgccaagaaagctacaagaacaaatagcaggtcagtcgttgcctgggtatcatggaggtagagggagggaagggaagaggaaagagtggatgccaaagaggaatgagaaacattttgagagtgaaggatatatacattatgttgattaaggtaatggtttcaccagtgcatcttttgccaagttcatcaaattatacactctaaataatgcagtttaatgtacatcaattatatctcaataatttggaatgaaaaaaaaaaactcctcacaaagaacaaaacctctaggacctgatagctttcagtcacaatatagtcaggcactcaaaaaaaaactttaacacaataaaattctctttgaatgccaccttaaactcaatcccatccagagaaaacaacttttattagaatgacatgtgatttgcatttttagttcatgcatttacttatatacacataaatatagctttttcacataaattagaatcattgctatgcatgttgttctaaaatgttgctttttcactcaaaaaatgtttagtaagataaaatctgctgcactctttttaacagaagcacagaattaaatcatatggatgcacttcgttttatgctactctacagagtgacaagacttctttgtgcatttatctttgagcacttatttatttctttgtaaaaggctttctaaatttccagatcatcaacaaagcattaatttggtcagttaaaaaacaattgcttatatccttctctgaaaagaatgatgtacagaaaagaattatatatatatatgaataatacatcataagtgttcagaaagacattgtattttaggtggagagacaggcaggtgaccagactgctacatgcagtaagatgaaccctgatagaactaacactggaggctgtgaaaaaactgctaggagcacccagccttggtagagcagcataatttcttcctgtaattctttctctccaaattgccatacacttcagcagagtttgcaacttctcttctaagtctttatccttcccccaaggcatgcctagcacaggactcttgaacagtgatgcctcaattagagttgctagccaatagattgaagctatgttggcacaatatcctacatcctcccgatctactggctgagcccaaccccacctaagaaggacaataaagatctgtgttcagagtcatactgaatagagacttctggactctatagaacccactgcctcctgatgaagtccctactgttcacccttgcagtttttatgctcctggcccaattggtctcaggtaaacagaatcttggggaagaagaaacactggcctggaacagggtcctgcacatggagtccctgtttctaagtggtctgtggaaatggggtctggcttctcactgggagcagggctgagatttgtcctacttcttcagaccacctctgttctaagaaacttgaaggctctcaggatagagcaggatctgtgatcggagctggggaggagggtaaggcaaatcccatacagttgcctccaaaggtagaaatgatcttgaaatcccaaacttctatcctgtcacttcgggtcagtccagtcaagccctgcctcatttcacttttgttttttttgctgccgatattccctcctgaggtaacaattatataatattacttcccccagttttcttggtcttacagagaggtctctgattttttgtttgtttgtttgttcttggatgtggttaacagaacaggaaaggctgtttctatatatgtataggactgtaaaatggaaaatgaaaaaaaaaattctgtgtgggaactattggaagtctatatcagatttcagctctgtttgtgtaagcatttcttatttttaatttattctgtagcttatatttacaaaaccaagacaagaacactgaaagttatttagaaataaattggccacatttcatcactgcttgcattttttcacttgtaaccaactgatatatgagcttataacctgctttatttttttacctacgattctatcaggaaaattttcacaggtcttgaatattccttgaaaatacaatttgcagtagatgcttataattctgtcatatttttgtaccaatattaacttggaaagtccttaattgtgtgtcatttggattattttttctaatgtgtgagtactgtaaataacattgtacaaccttattaatatatcattgtgagattctctgtttgtataggtaaattttagaagttccattgcttggtacaagggtattatttcttctaagttaactggcacatattgccaatggttactattggagtatttgtatttttaacatttgtatttcatatttcttgcaaatattttcaaacatattggttgcttctaaaatgcattatttatttgagacacataattttcattttcatgtcaaatctattggtgttttctttgcattcttccactaacttagtaagtccttctccgtgttgagaacagttattcacctatgattttgttttttacaccggactcaatcccacctttttacataaggcacaatgaaataaactaatattctttagtataatttcctaatgggttatataataactccatagcccgcctctagagatagtagtttatattccctaatttgcagaaatgttcaaattgatagtggataagaggaaattataatgctctcatggttgtctcaaaagatgtttcaggcctattgcatccttgaaattctatgagtttaaattgcctgatttctccctctgtctctggaacattagtgacatacatcgacatacatcacatacttgtatgttgtcctttttctacactttgtgtgtgtgtatatatattctaacatatacatatatataatgttaaaaactcaatcatcagaggaggattaaacagctgataagggataatagtagtggtaatagcattcaaaaacgtttgctctgttcacttactgtcaattacctcatatttctttcatttattgtacttatcacaatctgtagttattttgtttattcatttacttgtttattttctttctccccctctccaatgtaaggtcctcaaatcatgtctttctgttcattgttttattccctgcatcttgcagaattcttgacatggtaggcactcatcatatacttgttgattaagtacagtaatgagttaagcaaggtaagaaagagctccagcgtcactctagggcctctatgtgttaaaccatgtgatgagatattttcatatgtatataatatgtacacatatataggcaaaccctgcagaatgtctccctaatgaatatattcctaatggaatggctttttttattctcaaaattttgtaaaatgtacttatatctcaatatcatataggtatataggtatagatgaaaattttttatttatctttccataacttgacatgacatttttaaccagataatatgtaagataagcctagagttatcttctaaatataatttttaggatctcagaaacatgtaagggacattttgaaaatctcaccaattggcaacaaaagccatatgtgtttcagtaatggtgagaaagatgacagcaattattttagcatttcttatttttgaaatgatagtttttacttctgtttaggtgtttgtgttttagctacattttaggaaattgcttggggattttgtgttcatgtataacaacatgctatatattttcccatttaaaatcatggggaattggcccctggtaagtgtttgtatacagaattctgatttcagaaatgagaatctcatacatatctaaagaattctatgtgtgtttataaaatttcacttaatcctcaaagtaggtatttatgattaggaaaaacatgctaaagcaactggaaaggcacttgaataaacagtgctcaaaaactattgctattttttatcctcctgtgataaatacttaggcttaataatctatataattcctttattcaggtaattggtatgtgaaaaagtgtctaaacgacgttggaatttgcaagaagaagtgcaaacctgaagagatgcatgtaaagaatggttgggcaatgtgcggcaaacaaagggactgctgtgttccagctgacagacgtgctaattatcctgttttctgtgtccagacaaagactacaagaatttcaacagtaacagcaacaacagcaacaacaactttgatgatgactactgcttcgatgtcttcgatggctcctacccccgtttctcccactggttgaacattccagcctctgtctcctgctctaggatccccgactcattaaagcaaagaggcttattctggtgtcagttttctctctacagcccccttcccactttccctccattcaacagtgtctggaagggcaccacaatttcactgcactcgcatttctatggtagaaatgcaaataagataggggccaggaacaagggagggttagtccaaaacacccactcaggaatgatagatagtagcaatgtcctccttgaagacagttctaggcccacagcttgccatagcaattatcatcaaacttcatgtacatcagaaacacctggagagatggctaaagcacagatttctagggctcacttttagtttccaattctgcaggggagcttgagaatttgcactgctcacaagttcccaggtgatgctagggctgctggtccaggcaccacactgtgagaacaattagcttataatatgaaaggattgaaagccgactgtgaatgtgattttctacagattgaaggctgcatttcctatgtagttttggagtagatagtaatacaaaatcatcctacagaatcctccgacaacaacctgagaatgtaggtattataacctcactttagagaataggaaacttgatttctaagcattagaagactgggacagactaaattgactactgagaacattctgtcactgcaccatgaggttgcccaattttcttctcaccctggaaatcctcattcatagcttccaacttaaatatgatgaaagggagatcaagagctctataatgtgtcctgaatgttaggacaggcactcatcccaagcaatagaatgttttccgtacattacattacattgatgctctgcctgcaccaataagagaatatgactgggtgtatcatagtcatccatccatgcctcaggcccacttccctgatagttggacagggagaatagggaatgcagatgccttcgctttctggacacttacagtagctgtgtttgtctttgtcatctcagtttgctcacttatgaaatgctagcgttttactcagtatctttctccccacccctgtcatagtacatctttctgattctgaagatataagattggcttatgttttgtggggtcaacttcacctttgaccccataagatcctagagatttaatgtagatatataaaagttggagaaaacattggtggaagggttttctccactatagacacaaatccatgagtgtcatcacagactccttttccttcttcacttgattccagtgaagatccatgttcattctaccacctccaatatgtaccatgacctctatctccagctgctgctaggatgattgcaatagccttcccattgattgccctgcattcctttcacactcacgcctaactatcctccacaatgagagccagaatcatttttctgaaacacagatctaatcattagactcccctctggcatcttttcccatagcatcctaagacaactcttcagagcagccttcatcactcttggcattcagaacctgccttgcgtttccagttttacctccaaagcactgtcacagggcatcttgctatcccaccaacatacctcttcgtgattggtttgaactcactggattgcttctggttttgagtttttgtacatacttttctgtctccatttataactgcctggaaaaaaatctttattttcttctggaggactttgataaccacactgttctacccacaatagaactactgccaccatttgtgctccactgttatgacttacccagaattttaagtcatcatgtcacatgcctcactctgaatatctgcttatgtcttctcccctactggactttgaaattttatttaggaacaggaaccatcttatcttctctttctcctaccatcccctaacaagattctatattaattcttgttgaataagtaagagggattctcgaaggccagaaagatctttggatgttactgaaatctcatttttatttattttagatcttctccaggaaacaggcttctgtctcctttagaagacatatctatgatctatgtcattacatagtagaggagttttgagaggtggcttgtcccatgtggtaggacatcattgcctcttacacccatgcttatctttgcaggcagaactcatgaactcacacaagaaggtgggcagatggaagcaagttacttcagcagaggagaatagtaggaaaaaaacataactttagagctggatgtatctgaggtcattcatgatcccaccatatatccactcttggaccacagacaaatgatttcccatcttcgagcctgttactgaatttgaagaacagagaaaatactcactcccactcaaggtactttgagggttgccagagtaatctattaaaatgttaatcatatcatagggattcagctgtaacaggttgttccctggataagaaacagtacagcacatttccccagggccctgcccactgggccttggctgtcttgcctgagtatgggtgattatagcctatgtttcacctgggggaagacgcattaggctgagaagagtgtaacagagttgagggtcatgggatctctttgaacagccagatgagattttaaaggttctagtagaacttgctgtgcttacttttcaataatcaccttgatcactaccttggaaacatcttagagctattatcacattgattctagacgatgaatataatctcagtgctgcagcctgaaacattgtcctcctgtcctcttgccttatatctcatccgtccttcacgcagtgctggaacttaggtggcaaatattcttttcccactttggagttgactaatggcattaggaggccaagggaaaaggaatctttatggtgagagaaactgcaatgtgccaagcacattaatacacaatttcttaaacaaaagcattgtatgataattatgacaacatgattaaagctgaggaacctggagtaaaatgtatctagggttacatctaggtttgttccttactacttttactcatcatgtggtctctatatcaatttcttcatttgcaagacaggtataatcatgcatctacctcttagaatcactctaaaaattaaaatagataaggcatataggtcaccgtgatctctagcaccaatgaaattctaagaaatgtagattttaaaaggcatatgagatataggttattctggtttaaaatatgaaacgtttaaaaaataaaatatgtaagtcctgagtttccgggagaaaaagggtcttgcacaagaacaaccatatttgggaggcaattttacctgttctcaaggccgcatctctaccccatctcatgcgaatcctgacccatatttgggaggcaattttacctgttctcaaggccgcatctctaccccatctcatgcgaatcctgacccatatttgggaggcaattttacctgttctcaaggccgcatctctaccccatctcatgcgaatcctgacgacgtcctcaaagctgaataaatttttgccttaaataaattaaacgagatttagatttcaccagtcactgatactcaatcccaattggatattcattcaaaagtctgacttctctcctgaggtgagagtaagattcctgggcactttttcataatacttaccttaacctagctaaacacaatggacactcttctttgaggtgtcagtggaaattaagaggagagtctgaactcttacctcccacatggggcttgcagacaggtgaagatggcgctcctcccctttgttggtaatggagacctagaagaaaggctgggcatccagctcccacgcagtcatatgaagcagcccagagcaacattccccttcactgcctgtgcggtggcagtagagacctagcagtagagacctagctgggagtcagatctcccatccctcaaccagtggtagtgattggcctggggaggaatcccttccctgctggtgccatgtcagtgaaaactgaggggagactgaaattgcccttccttccaatagtataaaaggcctgaagcagacttcccttcccagccagtacattaccattgaagaccaaggggtggtctcaacttcaatccctagggagccgtggctggcatcaaccctccttccagtcagtgaggatagaggataggagggtgctggaaaataggtgtctttaaaactgaataatgttgtttttaccacaattttaaaaactgaataagaagacatggcagacccctgaaactggataactacacacggaactaaccagaattaacatgcagaaggtttgagaatagaactgcagtggggaataccacctagatttttaaaataacaacttgtatatatttaaggatatatgcaatatgatgttttgatatacatagacatagtaaaatgattgctataatcaaattaacatatccttctcttcacatagttatcattttttgaggagacagcacctgaaatccatcttcttagcaaatttctagtatacaacaccatattattaactagagtccccatactgccctttagctctctagactttatcctacacaacttcaactttgtacccttcgacgagcatccccccatttcctccaccacccgccccacccctgataatcactggtctacactcttctatgtatttgaatttttaaattccatgtataagtgagatcatgctgtactttttttctgtgtctgtcttatttcacttagcataatgtcctctgggttcatccatgttgttctgaatggcaagctctcctttgtcaaggctgaataatatgccattgtatatatatacaatttatttagtgtgttcatctatcgatgtcgatagatgataatgtcttcatctatcagcttaggttgatttcatatcttggctattgtgaataatgctgagcacagatatctctacatggtgccgatttcatttctttttggtatataccaagacgagggattgatggctcatatactagttctgtttttatttttttgagaagcctccatactgttttacatcattgttgtactaatttacatttccaccaacagtgcgcaaaagttccctttacattctcaccaatacttgtgatctcttgtctttgtgataatagtcatcctaacaagtgtgaagtgatttctcattgtgcttttgatttgcatttccctgatgattagtgatgttgagcacctttccatacacttgttagccacttttatttcttctccagaaatatttctgttcatgtctttgcccaattttcaagtgggctctttgttttttgctactgagttgtgtatgtttcttatatgttttttatattaaccttatgtgatatatggtgggcaagtattttcctcccatcccataaactgccttctcactctgttgactgtttcctttgctgtgcaacaaatgatcttcaatgataatacaaagaatatgcaatacagaaatgatagtcacttcaacagatggtgttgggaaaactggatttccacaggcagaacaaatgaaatggatccttatcttacaccacacacacacacacaaactcaaaatggatttaaagacttaaatgtgagcctggcaaacttaaaactcctaaaataaaacagaagggaatatctttatgactttggtctaggcaacagttgcttgaatatgacatcaaaaccacaagcaacaaaagcaaaaatatattagtgggactatggatacatttgaaacaaactacaaactagtaaaatctcagcaaagaaatagaagatataggccaggcacggtggctcacgcctgtaatcccagcattttgggaggccgaagagggcggatcacgaggtcaggagatcgagaccatcctggctaacatgataaaaccccgtctctactaaaaaaaaaaatacaaaaaattagtggggcatggtgacaggcacctgtagtcccagctgcttgggaggttgaggcaggaggatggcgtgaacctggcaggcggaggttacagtgagccaagatcatgccactgcactccagcctgggtgacagagcgagactccatctcaaaaaaagaaaaacagaaaaaagaaaaagaaatagaagatatgaaaataatcaaatggaaattataaatttatgaaatgtaatcaaagtaaaaaagaaaaagtcactgtataggctcaatagtagatggaacatgacagaggaaaaaataagacagatctatagaattacccaatctaaaaacagagaaaaatagactgataaaaatgaacagagccacagatacctgtgggacataaaaagatctaatgttcatgtcatcagagtcctcaaggagagggagagtgtggaactgaaaaaaatatttgaaggaataatgcctgaaaaatatcccaagtgtggcagaatacatacatctgtaattcaagatcttgaattaacccaaaacaagataaacccaaagaaatccatgccaagataaagtataatcaaactaaaactaatagctagagacagaaaaaaatcaagcgagcattcagaaacaatacaccacccatggtaaaacaatggtttgattgatgggatttgtcatctgaaaccatggaagcaaaaaagaaatgtcatcacatgtttcaaatgccaaaataaagaactatcaaatccaaatcctatatctagcaaaaaaaaaaaaaaaaaagttctctaggaataaacagggaaagaaaaacattctcaaacaagaaactattaagggaatttgtcactagcagccctatcctaaaaatatagtcaaagaaagttctctaaaccaaaatgataaccgggggcttggaacttcagaaaggaagaagtcgaagtcaatagaatgggtaaaatgggaggtgaatataatagactatgcttttttttttgctttattttttttttatgctttcttttcttgagatagtgtctggctctgtcgcccggacaggagtgcagtggtacaatctcagctcactgcagcctcgacctcctgggatcaaaggatcttccctcctgagcccagtgagtagctgggaccacaggagccggctaatttttatatttttttgtagagacagggtttcactgtgttgcccaggctggtctcgaactcttagactcaagcaatctgctgcctcggcctcccaaagtgagactatctttttattaaagagttttgaaatcatgtttggtagattgaagcaaaaattgtaacattgtctgatgtggttctaaatagatgtagaggaagtacttaaacattataagctgggtaaggcaaagaaatttaaagtgaggtaagtttttatacttcattcaaacttgtaaaactttgacaccgtagactgtgataagttaggtacagcaaccactaaaaaaaataaataaatacaataagaaattatagctaaattatagtggaattctaaggaacaaatagaaaacaaaatataaaatggtaacttaatccctaacatgtatcaaaaagataccccatacaaatattaatcataagaaagtaggaatggctatattaacatcagttaaagcagacttcagagcaaaacaaattatcaaggacagagagggaaattatataatgccaaaagggtcaatcaaccaagaagacatggcagccctgatcgtccacaaactgaaaaccagagtttcaaaatacctgaagcaaaaactgataaaactaagaggagaaataaatttacaatatcaggccaggcgtggtgactcatccctgtaattccagcactttgggaggctgaggcaggcaaatcacttgagcttgggagtttgagatcacctgaggcaacatagtgagacccccctctctataaaagatacaaaaactaaggtgtggtggcccacgcctgttgtcccagctactcaggaggctgacatggaaggcttgagcccaggacatcgaggctgccgtgagctgtgcactccagcctgggtgacagagcgagaccccgtctcaaaaaaaaaaaaaaaaaaaaaattacaatatcaacttcaacagttgatagataggacaactagacataaaatccacaagggtgtagaagaatttaaaaataccacaaagcaacaggatctaatagacatttataaaacatttcatccaacaacaatggaatacactccttggtgtttatgccaaggaaatgaaagtgtttttctccacaactcccgggcaggaatatcaatggtagtgttatttataatagcccaaaagagtaaacaaccaaaacgtcattcaacaggtgaatgactaacatagggtggtacatccatacaatggaatacttctcagcagtaaaaaaaaaaaaaaaaatgaattattgatacatgcaacagcttatatagattataagagcattatgctgagtgatgaaaaaagacaaagggtcacatagtgtgtgactatattcacataacattgtctaaaaattatgaaatgtagaacaaattagtgctttccaggggttatgaatagtcaggagagggagggaaatatgccagtaagacaataagagagggagatcttttcataatgaataattctgtattttgatttgttgatggttaaatgaatctaagaaggatctgataatctagtattagacgcatagtacagtagtgaactttcagcctctagagaagtgctctccaatagaagtaactaaaaagatggaaatgttctaaatctgtactatacaatatgttagccactggtcatgtggttgtaaagcacttgatatgtgctctataatattttgagcaagtttcttatgttttctgtgcctttgagtttctcatttgtagaatggagataataatatctacctcaaagtgttgctgtaaaggtaaatgagtttatgtatgtaagacaccgacaggagtgccagcacatagaaagtgttatacaagggttagccatttgttattgtcattgttgtgttttgttctctttctaatgtctggaccttcaaatgattcagactcatgggaccatacttcattctgtttttataactttaacctgtaagattctcattttaattggaatttcatatttaggaattcttgggtgccttggatatatgaagaaaagattcacatctgcttccactaaacaactagcgaattaacaactgagatttcttataattaaattatttacttgatttttttaatccatataaatagcttgaacttaggttgaaacccatgagaatttgtggctacagttcatagggttaatatttaccttctccatccagagccaaggttaatgctgacaaaatacaatctaatacagattaatctgtgtgtgtgtgtatgtatacactcgtgtcagagagagagatttcattcttccttaggctgagattgttgcctttgaatctcaggtttatataagggtatcaattatatgtcttccctaggactagatcttagctttatacatctcacatagccatcaaaataatgttcaacttatctttcagggtttgcaatcttagtttttggcctgtgcagattcctttcatttttgacggtttctcaatgcagtaatttcctttttacatttacccaacttttttggttattttcaccagatacattgttcaatatatctattctactatattctattaataacagtctactatatatgtgtcttattgtctaatattgctgaaatctttttttaatccaataatgaatctctgtcatctaatcagtgagtttaagccatgtgaatgtattataactactgatctattaggacttttttctgccctccagttgtgacttatctattcctcattttttttagtttctgttggatggatcatatgttcttctgctaatatgaatattataattttatttttatttgttttattaaaaatttgtccttgctcttaggacccattcctatccttatatttattattactaatttaacatccagcttcagaaatacaactttaataggaaggctttttgtatttctcctgactgctcagacttagggtctttatttgatgctccaccaccaagtcacctataaggaaagtttgcattcacaggaagactataaataataaaaccaatcccttgactaggacttaaaccatgtaaaagctggtggcaaaagtaaagggaggtgacccttgagacctctgaggtaactgctcttaaatttacatttgcctctaaaaaggatttcttatatgtcaacatctctctgtttaaacatattcttgtgtaaaaccactacgtgacctgaataatggccatagggctcatctctaagccaactggcttatttatttaatgcatctcagtggttaacagggttgaaattttttgaaaactgcaatcaatgatcaaagaatgatctaggtaaacatcgattccttgtggcaacattttaatattttcaaagacaaggtacaactggtagaaaaaaaataccctcatgcatctttttcttctaattgtggtaaaatatatgacataacattggccattttagccatttttccttttatttttagttgacacataattgtacttatttataggatacaaagtgatatttcaatacatgcatataatgtgtaatgatcaaaccagggtaattagcatatccgtcacctcaaacatttatcatttgtattgggaacattcaaaatcctctcttctagccttttaaaagtatacaataaattgtagttaaccatattcaccttacagtgctacaacaccagaagtcattcctcctatctataattttgcatccattagccaatctctctccatcctcccctctccctaatcattaccagcctctaatattaatatctgcaacactactctctacttccatgtgctcaacttttttagctcccatatataaataggaacatgtggtaatctttctgtgcctgacatttcacataacataatgtcctccaggctatccatgttgttgcaaaggacagaatttcattatttttatgggtgaatagtattccattgtgtgtgtgtgtgtatatatatatatatatattccattgtgtgttatgtatgtatagtattccattgtgtgcatatatatgtatatatgtgtgtacatatatatatacataatatatattcttctgcacatggaaatccagtttctccagcatgatttattgaagagggtatcctttccccagtgtatgttcttggtgcttttataaaaaatcaggtgacctcagatcagacccaactacatcataccttctttcgaaatgtgcaagaaacctactagaaattcttattgttagagtttcagatttatgtcctggtttatactgccacattcattcttggaggtgagtacatttcgatcttggtccggctgcgcagagagtcaaagcaggaaaatcacagattcttcccagcagtctacagcctacacagcggcatttggtgcgatgggatggaacatgctgtatctctattccatgtgggggtaaagtgggtggcctgaaatttcctgtgtctgcctgcatgatgcaaagctcacagttcagaagcttaaggacacacttcatatcatcccatctgttctggttcagtgcataagaatctaagtctctgaggaaggtagcatagtgtgcagttcactggaccaaaagctttggctgcacctcttctggaaagcctggccatggggctcttcatgatcattgcaattctgctgttccagaaacccacaggtaaaccaaaccagaagctcactcaaatcaacagtgggatggagcattttcaggagccaaagggaacttcataatccacactaaagggaaatagagcccccaaagatggctaaagtttatccaacatcatcagaaatttcctctttctggagccttattccatgttactatccttaaagaggagtactcactgagctaaaaagaggtcataatttcttctgggaaagatgtgttgttatagaaaggaatgatgccaatatctagggatacctttatgtctttggatatggtttttactctgatgctcagctatatttccttttactcaaatatatatatgtgtgtgtgtgtgtgtgtgtgtgtgtgtgtgcatgaatagaggaagaagcaaattttggagttaggtttaagaaacatgccttcaatatctactagtttgtcaactttaagtagtgaagactctaggagcctcagtttcctcatctatggagataatgacacctggttaacaggggttttattaaatgatataacctatgtgaagcttggcacatactgagaactcaaaaattagagtttcctttcctctttcaaaaccagatttcttacatgtgtcccttattataagaatagtaatggcctattcctgaccctctacattcctaagacccaatagactactaccttactggataacatgaaagtcattcttgaccctgatagtgggtttgaactcaggagaacagtttgattcagacataaacacatagtaacaatacattgttctctgggcatcagaggaggtgcagtagaaggtagtgctctgggagcattcaggatgcaggcagatttgctgaggttcctatgtagagcatagttccatagcctagaatcaagggttcagctcctttattttctcagataagatcttatgttcttggcagagtctatcagatgttaagggaggcctaaaacctcacaggacctaaatataagtgatccagttaaatacaaacactgaggttgaccttgtcggaaaatcctcttcagaatatatgagggtctgccttgtggataccccatacccctaattcctacaagcctcctctgtcttccccaaaaccaacgtgccttcagtctcaaacactgatattgttctattgctcctttctgtgtatagtaaccgaacaacttaagaagtgctggaataactatgtacaaggacattgcaggaaaatctgcagagtaaatgaagtgcctgaggcactatgtgaaaatgggagatactgttgcctcaatatcaaggaactggaagcatgtaaaaaaattacaaagccacctcgtccaaagccagcaacacttgcactgactcttcaagactatgttacaataatagaaaatttcccaagcctgaagacacagtctacataaatcaaatacaatttcgttttcacttgcttctcaacctagtctaataaactaaggtgatgagatatacatcttcttccttttggtttcttgatccttaaaatgaccttcgagcatattctaataaagtgcattgccagttttctgtctcattttgttctttaaccaggggttgaacactcattatatactaggtaatgaattgataagaactcagaacctctccttgaaaaggggatatgacaagtacactaaaaaaaaaaagtcctatagtgtggaagtctggaataagaaactcagaaacactgacatgtaatttaggagagggaaaggtgaagcaaatattcaggggaaattcatgagtaagtttaggaataaagcagtgtcttgtagtaaataagtaaatagtaaagcagtaaataagtaggatttccatggatgaggtttggtagggaaggcaatttgagtgaacagaatgggaggaaattggaaaagacagaacatttcaagacactatacatgcactttgtttggatgaagaacagagcactcaaagttgaactatgggggaagtctgatttcctaagctcctgtgtaccagcagtgaactgggaagacggagataaataagattccactgttgtggagctcaacagtggagctcaacgcttcctctatgaagtggagaagacctaagtaaataactccaacacaaaagtttttaggtttttgctttgttgttgttgttgttgttgatgtgttcatcttttttgttattggggccctgtggagtttaggggaaatgtaaaagatctaggaattggtccaaattgtagtgctttcattgtcttgatatgcaagaagaataatccatgtacatactctgctgaattcttaaagatgtaccttctgaatatgattaacatggaaagtttcttcttcaactacatttcaaagtcatttgctagttttgtttcttatatcatttcaccataacaattacaagcattttaaagatttagttcatccactataacatttaccactaatgtgtggcatgtgttctcttaatctctctctttctggtgttctagggctggtatagggagcacctaaaacaagcctaaaatatcttgtggtgccagaaagtaagcaattgcttaataatcaaaggatagggtctgcaaacacggacaatttgacttcctcttttcctaattgaataccctttatttccttctcctgcctgattgccctggcgagaacttccaacactatgttgaataggagtggtgagagagggcatccctgtcttgtgccagttttcaaagggaatgcttccagtttttgcccattcagtatgatactggctgtgggtttgtcatagatagctcttattattttgaaatacgtcccatcaatacctaatttattgagagtttttagcatgaagggttgttgaattttgtcaaaggctttttctgcatctattgagataatcatgtggtttttgtctttggctctgtttatatgctgcattacatttattgatttgcgtatattgaaccagccttgcatcccagggatgaagcccacttgatcatggtggataagctttttgatgtgctgctggattcggtttgccagtattttattgaggatttttgcatcaatgttcatcaaggatattggtctaaaattctctttttcggttgtgtctctgcccggctttggtatcagaatgatgctggcctcataaaatgagttagggaggattccctctttttctattgattggaatagtttcagaaggaatggtaccagttcctccttgtacctctggtagaattcggctgtgaatccatctagtcctggactctttttggttggtaagctattgattattgccacaatttcagatcctgttattggtctattcagagatgcaacttcttcctagtttagtcttgggagagtgtatgtgtcgaggaatttatccatttcttctagattttctagtttatttgtgtagaggtgtttgtagtattctctgatggtagtttgtatttctgtgggatcggtggtgatatcccctttattgtatatgtagaaaaccccattgtctcagcccaaaatctccttaagctgataagcaactttagcaaagtctcaggatacaaaatcaatttaccaaaatcataagcattcttatacaccaacaacagacaaacagagagccaaatcatgagtgaactaccattcacaattgcttcaaagagaataaaatacctaggaatccaacttgcaagggatgtgaaggacctcttcaaggagaactacaaaccactgctcaaggaagtaaaagaggatacaaacaaatggaagaacattccatgctcatgggtaggaagaatcaatatcgtgaaaatcgccatactgcccaaggtaatttacagattcaatgccatccccatcaagctaccaatgcctttcttcacagaattggaaaaaaactactttaaagttcatatggaaccaaaaaagagcccgcatcgccaagtcaatcttaagccaaaagaacaaagctggaggcatcacactacctgacttcaaactctactacaaggctacagtaaccaaaacagcatggtactagtaccaaaacagagatgtagatcaatggaacagaacagagccctcagaaataacgccgcatatctacaactatctgatctttgacaaacctgagaaaaacaagcaatggggaaaggattccctatttaataaatggtgctgggaaaactggtagccatatgtagaaagctgaaactggatcccttccttacaccttatacaaaaatcaattcaagatggattaaagacttaaacgttagacctaaaaccataaaaaccctagaagaaaacctaggcattaccattcaggacataggcatgggcaaggacttcatgtctaaaacaccaaaagcaatggcaacaaaagacaaaattgacaaatgggatctaattaaactaaagagcttctgcacagcaaaagaaactaccatcagagtgaacaggcaacctacaaaatgcgagaaaattttcgcaacctactcatctgacaaagggttaatatccagaatctacaatgaactcaaacaaatttacaagaaaaaaacaaacaaccccatcaaaaagtgggtgaaggacatgaacagacacttctcaaaagaagacatttatgcaaccaaaaaacacatgaaaaaatgctcatcatcactggccatcagagaaatgcaaatcaaaaccacaatgagatatcatctcacaccagttagaatggcaatcattaaaaagtcaggaaacaacaggtgctggagaggatgtggagaaataggaacacttttacactgttggtgggactgtaaactagttcaaccattgtggaagtcagtgtggcgattcctcagggatctagaactagaaataccatttgacccagccatcccattactgggtatatacccaaatgactataaatcatgctgctataaagacacatgcacacgtatgtttattgcggcattattcacaatagcaaagacttggaactaacccaaatgtccaacaataatagactggattaagaaaatgtggcacatatacaccatggaatactatgcagccataaaaaatgatgagttcatgtcctttgtagggacatggatgaaataggaaatcatcattctcagtaaactatcgcaagaacaaaaaaccaaacaccgcatatcctcactcataggtgggaattgaacgagatcacatggacacaggaaggggaatatcacactctggggactgttgtggggtggggggaggggggagggatagcactgggagatatacctaaggctagatgacgagttagtgggtgcagcacaccaacatggcacatgtatacatatgtaactcacctgcacaatgtgcacatgtaccctaaaacttaaagtatttaaaaaaaaaaaaaaggatagggtcatattaaaagaacacaggagtcggtctaaaagagcttcaaatgaccaaagctgcgacaatttgagcaataaaataaataagatagcattggattataatacaacatataataaatatctatgagtccatgatgatatgaataaataattgaataaattggaaaattggtgagaacagatgtgccatatagaataattcccaataattcatacagatactccctgctgaagaaggtggagcttgacctccctctcccttgagcatgggctgtatttagctacttgtttccaaagagaagtgtgtggaaaggagttaaaaaataatttcacctggataaacctgataaggtcatgtttcagattttatggagaaatcatattgataacatgaacctgtgatatgatctgatgagaatggcacttcacttctgttttcttcctcccaaaaccctgcgacccaagacaaacaatgaaaaacatcagaaaaactcaaattcagtggcattctaaacaatatttgaccagtatttctaaaaactgtcaaatttatcaaaaaggaagaaattctgagccacagtcaaagaccagagaagcctaaagagacaggacaactaaaggtaatgtggtatcctggatggactcttggaacaggaaaagaacattaaggaaaaactagtggtgataatagtaataataataagtgtagagtcatttagtagcaatgtatttagctgtgatggctgcattgtggtaatataagatgttaacaatagcagaaactgggtgaatatttgggagctctctgtattatctttgcaacatttctataaatctaaaactattctaaaactgaaaatgtatttaaattttagaaaactgaccacaaaatcaatttggcacattccttttcttcttatttacgaaagagcttctcatttcttcattgaatgcttggtagaatctaatggtaaattcaactggaacggaactctttacaggaagtattgttatagattaagtttattgcaggttaaaaggcaattcagttttctatgccttctagtcaactgttgtatttggcatatatacttttcccatgttctaagatttttatacttgctatcctaaaactcttgtaatatcttctttttatcttattaatgcctgtaagatatgtaatgacaccttctttttcatttttgacatctattatttgttttattttctcttttttcttgataagtctcacattcacttattaatttgatttatctttacagaaaacaaattttcttcattaattttagtttagtttccatttcttagactgtgacttgcattgcccaattgaaagtgattgaaagtgacaggttcacttccaagtggaaacttaagagccagtgtgtccatgtgcagtggctcacacctgtaatctcagcactttgggatgctgaggcgggcagatcacctgaggtcaggagtttgagaccagcctggccatggtggtgaagccctgtctctactaaaaacacaaaaattagccaggcatggtggcagggcctgtaatcccagctatttgggaggctaaggaaggagaatcacttgagcccagaaggcggaggttgcaatgagctgagatcatgcctctgcactctagcctaggtgacagagccagactctttctcaaaagaaaaaaaaaaagagccagtgtgcagtttaaccgtctctcatctctctgccaaggtgattgtggaagcactgttgacatagagcctctgtcagcctgaagccccgagtgaccatgaaagcagggtcattcttttgacctaaaatagacatctagcactgccagaaataaccttttgggaagttactctatgagagctgaggtttgttttttattttgttttatatatattttttaaatcaggaataacttagaccagggtgaacaaactactgctgtcagggcaaatccagcccatagcctgcttttggaaataaatttgtattagaacacacacacacacacacacacacacacacacacacacacatacacacatacacacaaatatatcttcactaatgttctttttttcttgtttttcaaaaacttttacataccataaaattcacctgttttaagtgcacaatttagtgtcatttctattttttattttcggtatgcttttctttttgtaactttgttaggtgcatgtttatctttataaaagaaaagccttccttcttttcaaatatgagagtttaaagttgtaagtttctctctatacacagcctgagcaccatcccacaaattttcaatatagagtatgttcattgttacattataaaccttctcatttctcttaaaccatgagcatataaataacatatagattatataaagactatggatacaaatgttaatcatgcaattttgtcaactagttataattacatatacagtaacattactttggtgatatgtaaaccaaaatgtaaacaaaacttgaaagcaaacagaaaatatcatatgcaaaaacttgtacacacttgttcttcatacagtttgttttcaaatatgatcttctatcttgttataggttttctatggctttaaactgacatttatttttcatttatattgtcctctgttatgattcttccagtcctgaacttcctgcatcagtaatttttaaagatatttttggtttacagaagtttaccaattattaccataatttatcatcaatttattaactctcaccatcatttcaaaagtgaaagaaatttcactacctaaaaatatgtatgtatgacattttagaagaaaacagacttttaactaaatgcattcatgtctcttaaaatttagttctatcattttaatttttttcattttattacagaccagtttaaactttgtcagaaccccattagggcccatgtatccatttaacaacaaaattctgtaattcttaaattctcaaattcataatttatataaccactgatacccaattggtagtagtcttctgaggaatgtttctattccattattccttgtcttctctaatcactctctgaatctaaacttctctttagttttttttccctataattagatgttgaggtgtttggcttacttatcttctttattagaataaataatatgtatcccatccctaatgattagcactttgtcaatttttatatgtttatgacaggtggactcactcttattctaaactctgatattagtgatatccaatgccccattcagagaccattaaattaaaaatgcacttattacttctgggactttctagacaatttccttcatctttaaaagatctgggacaaacaccacaagctttgtcccacatgaaagttctctgcccaagtaatgaagcatctaaaaatgctagtaaagatattagattttaatataacacatcaataattatatttaatataaatgatctaaatcaggggtccccaccccccaggccatggaccggtataggtttgtggcctgttaggaactgggccacagagcaggaggtgagcagcagtgggagtgagcattaccacctgagctctgcctcctgtcagatcagctgtggcattagattctcataggagtttgaaccttattgtgaactgcacatgcaaaggatctttgcgtgctccttatgagaatctaatgcctgatgatccaaagtggaacagtttcatcctgaaaccatcttcccatccctgccagtttatggaaaaattgactgcattaaaccggtccctggtgccaaaaaggctggggaccactgatctaaatacaccaataaaaagaaaaagattgtaagattggattttaaaagacctgactctatactgaccacaaaaaaaaaccctcactttattctttattgcatatatttatggtgtacaacatgatgttttgatacatgttgtgaaatggttaatatagtcaggcaaatcaacacgttcatcatctcacatagtttccctttgtgtgtgtgtcgcaagagcacactacttttttaacaaaaattccaagtaaaatataatattatcatagacctcacgttgtacattagacctctagacttttttaatcttacgtatctgcaattttttatcctttgacctacatctctccatttccttcccctccaaccacacccctggtaacgaccacattattctctatctccttgtattcagctttccttttttttcttttaagattccatgtataagtgaaatagtgcagtatttttctttctgtgtcagtttatttcatttagcataatgttcttcatgttcattcatgccttggcaaatggcaggatctcctttttgaagagtaaataatattccattgtgtgtgtgtgtcacagtttatccattcatctatcaacagttcacttgtttcaaaattttgactattgtgaataatgctgcaataaatatgaaagtacagatacctctatgaagttaagtggtgatttcatttcatttttttttttaaagacagggtgtcacagtgttactctgtagcccaggctggaatgcagtggtgcaatcatagctcactgtaaatctcaaactcctaggctcaaggaatcctgcctcagtctcctgagtagctgggactacagacacacaccatgcttagtcaatgttttttaggtacagggtcttgctgtgtagcccaggctgggctcaaagtcctgacctcaagcaatcctcctgctttgacttcccaaattaccgggattacaagcatgaaccacctcactcagcctggtagttctatttctaattcctttagaagccttcatactgactccacaatggctacatctgtctacattcccaccaagaatgtacaaaggttcccttttctccacaccctcattaacaattgttatatcttgtctttttggtaatagttatactaacaggcatgaggtgatgtctcattgtggttttgatttacatttccctaatgattagtgattttgagccccttttcacatacttcttggccattgttatgtcttctttggagaaatgtcttttcaagtctttgtccatttttttaattgggtttggtttttttttactgctactgagctgtatgagttctttatatattttatatattaatcccttatcagatatatttaatataaagacaaagaaaagctataagactttatatcttaaaaagctggagtggctatattaatattgaacaaaatagatttcaaaacaagaaatactaccagggatcaagacgcacagaaagaagtcaattcaccatgaaaatataacaatactaaatgtgcatgcaactaacaatagaacttcaaaataaaagcttgtagaactaaaaaagagaaatagagaaatcttcacctacaactggagatttttagactgacattagcaagatggcagaataggaggttccaagcatccctcctctcaacagaaaattcaactggcagatatccatgacaagagcactttggtaaaaatcccaaaacttggaaataagccaaagacacccatgttgaccacagaactgaataaaaaccacattagaagggggaagagaaaaggtctcactttgaccaggccacccctcctccactccctcgcccaagttggcacaccactatgcagacaggattgccctaggcctacagtttctccagtgggaaaagaaaactaaagatgaacattcagcttccttagccattcctggaatattctcagaaagcccatttcagtctcagttcacagggaaagcaggggataacggtgtggttagatcacctgggttcagatagaaaaaaagaaaagggggcattgctcacagtgaccagtatgaagatactgttggtagctctgtgtcactgccagcagaggtaccagccaacagcataagccacctgcaaagccaagctggtcactcccagaagcacagtggaaatttccatctggcttgagtccctagatggccagcctccacagccagcctcaaatccctccccaaggccccacgcagaaatggagatacctgcaacaaagcatttcaaacaaaagaaacaactgagacttgtgccccagggcatttaaacagtggctcagactcaaagctcactcaaggagggagatgcccaccacagcacctttcagcaaagcccagaggctggactagccacacccagaagtataaatggtggctcacctcagcctcaaagcccaccccaagtctctgcctaggcaagggggcaagcctcaaccatgcatttcaacaaagcatagcagctggtcccaactaccctgaacaaaacctatctaacctcaggacccaaacagtggtagtgcccggccggggaaaataccatgtctgttaagggttcttaccatgattttaaaaaagaaagaaaacctatacacagacattcccaacagctttattcataattgccagaaattgaatacaatctgaatatccttcactgtgtggcttttaaaaaatcgcatttatagtacatccatagcatggaatattacttagcaataaaaagaaacaaagtattcatacaagttggagggatcttcaaggaacactaagagtaaaaatgccaatttaaaaagattacatatctatgattccatttatatggcattcttgaaatgacaaaattatagagctagagaacagattcctgtttacccagggttagggaaggagggagaaggctctcactggaaaagggtagcacaaggagtctatgtgataaactgttttgtgtcttgactgtaatggtggtcacaaaaatcaaagcatgtcataaaattgtgtaaaactaaatacatacctacatgcacacacacaaacaaatgactacatacatgtaaaactgatgacatctgattaagaccaatggagtatatcaatgtcaatttcctgattatagttaaacaagatgtaaccattggagggaaaaggtatatgggatttctctgcatgtaggtaagtctaaacatatctcaaaattattttaaatgtcaacttttaggaacagctgatattttctctgtatttatcctaaatcactaaggctttcacaagatctctgctccaaagaccaccatatttctttttaaatgacatatctattgtgaaatgcatttatgatagtcagtattctcatgctgtggaaatatactttaaaaagaatatagtctttatcctatactgaagctcttgtcccatcctgtccttttcaaacactcagcagttcaattgagctttacaacttccatgcacttcacaaaaagaaataaaatagtggaggctacgctgatctcagctggttttcatatatttgggggtcagatggctatagactgatataagctagcctctgctgggacaactgggttcttctccaaaatgtctctcttgtccttcctgcagactagactggtcttgttcacctgactgaggcagggttccaatggagaaggcaaaggcacacaggccttttgaggcataggcttggaaatagcacaatttcatttgtgccatattctctctttttatgactttattatttgaatttgtatattgcacaagacttcctattgttcagatttcatttgctttctttctcttgtattttaacatccttcacaattctcacatcattattaaaagttgcacttaacctagtaatagataagcattagctgaaattagtaattgcttaacttctatcctacactactttatcacatactagtgtgtcatgtttcatagtataggaacaaagtaatcttgcacgatgatatctctgatgcataccactatatttttgctcatggaatgacagcaaaattaatttttctgctgccaaactaatattcagccaatcttttattcatcaaatctaactacttagaccaggggcagtttcctttagagttagactgtaatttgtgtactaatttttttttggttttttgtttgtttgcttgttttgctaagggaaaaatttattttcctgatgtatttattattttttagcttttattttagttttagttttaggaatacatgtgcaagtttgttatataggtaaattgcatgtcatgggtgtttggtgttcacattcttttgtcagccagataaccatattctctcttttaacgcctatttaaaattatatatttttaagctatacaatgtgatgttttgatatacatatgcatatttaagctatacaatgtcatgttttgttgtacatatgcatatttaagctatacaatgtcatgttttgatgtacatatgcatatttaagctatacaatgtcatgttttgatgtacatatgcatcttgaaatgaatactatagtcaggctaattaacatatcagtctcttcacgtagttaccattgtgtgtgtgacaagaatgcttaagatctactctgatagtaaatttcaactatataatacagtattatctcttttttattttttacttttatttgtttatttttttgagacagagtctctctgtgtctcccaggctggagtgcggtggcgccatctcggctcactgcaagctctggctcccaggttcacgccattctcctgcctcagcctcctgagcagctgggactacaggtgcccaccaccacgcctggctagtttttttgtatttttagtagagacggggtttcactgtgttagccaggatggtctcgatctcctgacctcgtgatccgcccacctcggcctcccaaagtgctgggattacaggcgtgagccaccacgcccagcctttatttatttatttattttgagatagagtctcgctctgtggcccaggctggagtgcagtggcagcatctcagctcactgaaatctctgcctcccaggttcaagcaattctcctgcctcaacctcccaagtagctgggactacaggcaccctccaccacacccagctaatttttttatttttcatagagacggggttttgccatgtcggccaggctggtcttgaactcctgacctgaagtgatccacctgcctcggcctcccaaagtgctgggattacaggcatgtgccaccatgcctggctgatttttgtatttttagtagagacggggtttcaccatgttggacaggctggtctcgaactcctgacctcaagtgatctgcttgcctcagcctcccaaagtcctgggattacaggcgtgaaccactgcttccggccacagtattatcaactgaggtccccatgctgtgcattagatctcaaaaacttaatcatcctacaatactggaacgtactctttgaccaacatcttttgattctgccaccattgcttctgataatcactattctctctccttctatgaatttgacttttcaagattctacatgtaagtgatatcatgcagtatttttcttcctgtgcctggcttattttacttagtataatgtcctccaggttcatgcacattgcacaaacgacaggatttctttgttttaagactgaataatatttcatattggatacaacctaagtgttcaacagatgaatggataaacaaattgtggtatataccacctgttctcccttgtaagtggaagctaaatgtcaggcctctgagccgaagctaagccatcacatcccttgtgacctgcacctatacgcctacatggcctgaagtaactgaagaatcacaaaagaagtgaaaatggcctgttcttgccttaactgatgacattccaccacaaaagaagtgaaaatggctggtccttgccttaactgatgacattaccttgtgaaatcccttttcctggctcatcttggctcaaaaagctcccccactgagcaccttgtgacccccactcctgcctgccagagaacaactcccctttgactgtaattttcctttacctacccaaatcttataaaacggccccacctctatctcccttcactgactctgttttcggactcagcctgcctgcacccaggtgaaataaacagccttgttgctcacacaaagcctgtttggtggtctcttcacacggacgcgagtgaaattttggtgccgtgactcggatcaggggacctcccttgagagatcaatcccctgtcctcctgctctttgctccctgagaaagatccacctacgacctcaggtcctcagactgaccagcccaaggaacatgacaccaattttaaatcaggtaagcggcctttttgtactctcttcttcaatctcactatccctcaacctctttctcctttcaatcttggcgccacacttcaatctctcccttctcttaatttcagttcctttccttttctcctagggacaggagacgcattttatccgtgaacccaaaactccggcgtgggtcacggactcagcaaggcagacttcccttggtgtttaatcattgcgggaatgcctctctgaatattcacccacatttcagaggtgtctgaccacatggggacgcctgccttggtccttcacccttagcagcaagtaccgcttttctagggagcaaacaccccccaccccttctctccatgtctctactctctcttttctctgggcttgcctccttcactatgggcagccttccaccctccattcctccttcttctcccttagcctgtgttttcaagaacttaaaacctcttcaactcacacctgacctaaacctaaatgccttattttcttctacaatgccgcttgacctcagtacaaactcgacagtggttccaaatagccagaaaacagcacttttggtttttccatcctacaagatctagataattcttttcataaaataggcaaacggtcggaggtgtttgacatccaggcattcttttacacattgttccctccctagtctctgttcccaatgtgtctcgtcccacatcctccttctttccctcccacctgtcctctcagtcccaatcccaagcattgctgagtctttctaatcttcgttttctgcagacccctctgacctcttacctcctccccaggctgctcctcgccaggccgagccaggtcccaattcttcctcagcctctgctcctccaccctataatccttttatcacctcccctcctcacacctgctagccctaccccacttgcccagcaatttcctcttaaaaaggtggttggagctaaaggcatagtcatggttaatgctcctttttctctatccgaactctcccaaaatcagttagcgtttaggttctttttcatcaaatatgaaaaacccagcccagttcatggctcattcggcagcaaccctgagatgctttacagccctagaccctaaaaggtcaaaaggccgtcttatcctcaatatacattttattgcccaatctgccccgacattaaataaaactccaaaaagtaaattccagccctcaaaccccacaacaggacttaattaacctcgccttcaaggtgtacaataatagagtagaggcagccaagtagcaatgtatttctgagttgcaattccttgcctccactgtgagacaatccccagccacatctccagcacacaagaactccaaacgcctgaaccgcagctgccaggagttcctccagaacctcctcccccaaagtccgtccccttcttaatcaatacggaagctacccactccacattaccttcttttcaagggcttgtttcccttgcctccataactgttgtaggtattgacggccaggcttctaaacctcttaaaaactccccaactctggtgccaacttagacaacattcttttatgcactcttttttagttatgcccatctgccgaattctcttattaggccaagatattttaagtaaattatctgcttccctgactgttcctggactacagccacacctcattgctgcccttttccccagttcaaagcctccttcgcatcctcctctcatatccccccaccttacccacaagtataagatacctctactccctccttggtgactgatcatgcaccccttaccatcccattaaaacctaatcacccttaccccattcaatgccaatatcccatcccacagcacgctttaaaaagattaaagcctgttatcacttgcctgttacagcatggccttttaaagcctataaactctccttacaattcccccattttacctgtcctaaaaccggacaaggcttacaggttagttcaggatctgcaccttatccaccaaattattttgcctatccaccccgtggtgccaaacccatatactctcctatcctcaatacctccctccacaacccattattctgttctggatctcaaacatgctttctttactattcctttgcaccctacatcccagcctctcttcgctttcacttggactgaccctgacacccattaggctcagcaaattacctgggctgtactgccgcaagccttcacagacagcccccattacttcagtcaagcccaaatttcatcctcatctgttacccatctcggcataattctcataaaaacacaggtgctctccctgctgatcgtgtccgactaatctcccaaaccccaatcccttctacaaaacaacaactcccttccttctaggcatggttagtgcagtcagaattcttacacaagagccaggaacatgccctgtagcctttctgtccaaacaacttgaccttactcttttagcctggctctcatgtctgcgtgcagcggctgccgccgccctaatacttttagaggccctcaaaatcacaaactatgctcaactcactctctacagttctcataacttccaaaatctattttcttcctcatacctgacacatatactttctgctccccagctccttcagctgtactcactcttttttgagtctcccacaattacccttgttcctggctcagacttcaatccggcctcccacgttattctggataccacacctgaccctcatgactgtatctctctgatccacctgacgtacaccgcatttcccccattatttccctcttccctgttcctcaccctgatcacatttagtttattgatggcagttccactaggcctaatcgctacacaccagcaaaggcaggctatgctatagtacaagccaccagcccacctcttagaacctctcatttcctttccatcatggaaatctgtcctcaaggaaataacttctcagtgttccatctgctattctactactcctcagggattattcaggccccctcccttccctacacatcaagctcagggattttcccctgcccaggactggcaactcttaactccctcttagagtggatagatgctctttgctggcaggggaccctccaatcttttcaccctgatgaagttctattctttacttttatactcactcttattctcattcccattcttatgccaccctctacctctccccagctatctccaccacactatcaaccttacccattctctcctagccgtttctaatccctccttagtgaacaaccgctggctttgcatttccctttcttccagcacctacacagttgtccccaccttacatgcagactaggcaacatctcctatctccttacacctccaaacttcctttaacagccctcacctttaccctcctgaagaactcatttactttctagacaggtccagcaacacctcctgagacatctcacatcagcaagctgccgccctcctccgcacttaattaaaaaacctttctccttatatcaactctactcccccaatatttggacctctcacaacacaaactactattcctgtggccgctcctttatgtatctctcggcaaagacccactggaattcccctaggtaacctttcaccttctcgatgttcctttattcttcatctccaaagcccaactacacacatcactgaaacaataggagccttccagctacatattacagacaagccctctatcaatactggcaaacttaaaaacattagctgtaattattgcttaggaagacacttaccctgtatttcactccatctttggctgccttccccttgctcatcagactctcctcccaggccctcttcttgtttacttatacccagccctgtaaataacagtgaaagtttgcttgtagacacttgacgttttctcatacaccatgaaaatcaaacctccccctctatgcagttaccccatcagtccccattacaacctctgatggctgccaccccagctggatccctaagagtctaggtacaagacactcctttcagcattccttctcatctttttactttgcatctccggttttgcctcacacaaggtctcttcttcctctgtggatcctctacctacatgtgtctacctgctaattggacaggcacatgcacactagttttccttactcccaaaattcaatttgcaaatgggaccgaagagctccctgttcccctcacgacactgacacgacaaaaaagagttattccactaattcccttgcttgtcggtttaggactttctgcctccactattgctctcagtactagaatagcaggcatttcaacctctgtcacgaccttccatagcctgtctaatgacttctctgctagcaccacagacatatcacaaactttatcagtcctccaggcccaagttgactctttagctgcagttgtcctccaaaaccaccgaggccttgacttactcactgctgaaaaaggaggactctgtatattcttaaatgaagagtgttgtttttatgtaaatcaatctggcctggtatatgacaacataaaaaaactcaagaatagagcccaaaaacttgccagccaagcaagtaattacactgaacccccttgggcactctctaattagacgtcctgggtcctcccaattcttagtcctttaatacctatttttctccttcttttattcagaccttgtatcttccatttagtttctcagttcatccaaaaccgtatccaggccctcaccaatcattctatacgacaaatgtttcttctaacaaccccacaatatcaccccttaccacaaaatcttccttcagctcaatctctcccactctaggttccatgacccaatcctgctcaaagcagccctgagaaacatcacccattatctctccatgccagccccccaccaaaaatatttttttcgctgccccaacacttcaatactattttatgttatttttcttattaatataagaaggcaggaatgtcagacctctgagccgaagctaaaccatcgcatcccctgtgacctgcatgtatatgcccagatggcctgaagtaactgaagaatcaccaaagaagtgaaagtggcctgttaatgccttaactgatgacattccaccacaaaagaagtgaaaatggctggtccttgccttaactgatgacattaccttgtgaaatcctttctcctggctcatcctggctcaaaaagctcccccactgagcaccttgtgacccccactcctgcctgccagagaacaactcccctttgactgtaattttcctttacctacccaaatcttataaaatggccccacccctatctcccttcactgactctcttttcggactcagcccgcctgcacccaggtgaaatagccttgttgctcacacaaagcctgtttggtggtctcttcacatggatgtgagtgaaattaatattaggtacacacagacataaagatgggaaaaatagacagtgaagattttaaaggggataaggaagggagaggagcaaatgttgaaaaactatctattctgtactatgtttgctacttgggtgacagggtcattagaagcccaaacctcagcatcacacaataagcccatgtaacaaatctgtacatttatcccctgaatctagattttaaaataaggctgggtgtggtggctcacacctgtaatccaaacactttgggaggctgaggcaggaggattgcttgagcccaggagttcaagaccagcctgggcaacatagaccttgtctctacaaaaaataaacaaaatcagcaaaatgtggaggtgcgcctgtagtcccagctgctcaggagactgaggcaggaagattacttgagcccaggagctcaaggttgcagtgagctgagatcgtgccactgtactccagcctaggctaccaagtgagattttgtctcaaagaaaataagataaaattttttcttacattgtgatatatatgcacaatggaattttcaaatatatagtatattatcactaactgtagccaccatgatgtaaatagagctcttgaattttttttttcttcttttgaaaacagagttttgctcttgttgctctggccagagtccaatggtgcgatcttggctcattgcaacctctgcctccccagttcaagtgattctcctgtctcagcctcccaagtagctgggattacaggcacatgccaccacgcctggctaatttttgcatttttagtcaaggcggggtttcaccatgttggccagactggtcccaaactcctgacctcaggtgatctgcctgcctcagtgtcccaaagtgctaggattataagcatgagccaccgtgcctgaactctcttgagcttatttttcctgtctaagtgatttccccacccctagcctctgataactaccattttactctttgtttctatgaattcaacttttttacactctacatagaagtgagatcatgtctttctgtgcctggtttatttcatttagcttactgtcctccaggttcatccatgttgttgcaaatgacagaatttacttcttttttaaagctgaaaagtattccattgtgattatgtaccaccattttctttattaattcatctattaatgggcacttaagttgattccatgccttggttattgtgaataatgctgaaattaacatgaaagtgcagatatcttttcaacatgctgattttatttccattagctatatacccagtaatgggattgctggatcatatagtagttttcattttaattttttaaggaacttccatacagttttccataatagctatactaatttttattcccaccaacagtgtgcaagggttcccatttctccacatcctttccaacacttattctctttcatagtatattttgaagtcaggtagtgtgatgccttcagctttgttctttttgctcaagattgttttggctattcaaaatcttttgtggttcaatccaaattttaagatttttttctgtttcagtaaaaaatgtctttggaattttgatagggattgcattaaatctatagaccactttgggtactacagatattttaacaatattaattttttactttcatgaacatgggatatctttccatctgtgtcttcttcaatttcttccatcaaagttttatacattttagtgtagaggccttttacctctttgttaaatttattcctaagtatttttgtagctattgtaaaaggatcatttacttgattcacttctcaggtgttcttgttagtattcagaaaagctgctgatttttgtatgttgaatttatatcctgccactttactgaattcatttattagttctaatagttatttggcaaagtcttcaggattttctgtatatacgattatgtcatctgcaaaaagaaacaatttcacttcttccttcccattttaatgctctttttattgcattttcttgcctaattaatctggctagaatttccagtactacattgatagaagtggcaaaagtgggcattattttgttctttatcttaaagaaaaagcttttgactgttcaccattgagtatgatgttaaatggggcttgtcatatatgatctttattgtgttgagatcattctttctgtatctaatttgttgagttttatcacaaaaggacgctgaatgttgtcaagtgttttttctgcatctgttgagatgatcatatggtttttacccatcactctgttaatgtagataaatctcacttgatcatggtgaataatccatttaaagtattgttgaattcaatttgctagtattttcttgaggtttttgtatctctgttctagggacatcgacctataacttttttttcttgtatgcccttgctctggctttattataagggtactgctaccccagcatgatttccaaatggctatgaaccagtgactgctgtgtacaaccaacttttcctcctttcaaatgggagtgttgtggttataacattataaaacaaatcttgcaaagttagatagaaggcatcagttctagtgtttgatagcacagcagagtggctattgttaacaacaatttattgtatatttcaaaatagctaaaagagaagttttgaaatgttcccaacacaaagaaaggacaaatgtccaaggtgctggatatcctaaataatctgacttgattattacacattatatgcatgtatcaaaatatcacatgtgcccagaaatatgtacaaatactatgtatcaataaaaaagtttttaaaaaataaatattacatataatatatgaattatataataaaactagaatataatataaaaaggaaaaaatatatgtaaaataaatcttcataataaaataaaataaaataatttgaaagagtctatgaataagattttggagactactctaagacagatgcaagagcaggtaccaataattctgtctgtaccaaaagagtgaataataaaaatatacaatttcaacttaattttgcataaaaaaaagtgaacaaataaacatgcatctaacaatactgaccacatccacgtcttctatgagtatggaggggataaaagaataaaagaaaaaagtcaaagcgaagattagatccccccagtcagagcagaattcaagggttaatttatctgttcaattaagtatatccctcacccccaactcagaagacacttctctgatttatctgacactaagccaaaatggattctcttatctaatttatcagtagaatcatatagagtagaggacacatgtagattaaagacagtgagccagacccatcttcactgtcacagtgacagaatggaccctcctttaaaatacccctggtgacattgtaatgaaagactaaaaaagaaaggggcttataaagtgctgcagtgaaaaaaagggcttcttatgtgagccttacttttaaagttccctaagaattaggttgaaaaaggtcatacattgactttcatagtgctgaaatcatcaacaaaaatttctaaaattctgcaaagtccagtcactgttacctgtgcacttctccagaattttcaaaagccaaactactaaaaggaaggttcttgtatgctcttgaaactttaatatatccagctaaatatttttctccttcctccccctgaaacaaggtggtgagctgctcatggagtaataaggttcattgatttctttatctcacatgagtaaatattagctctacaaaagttatttatgaccagtgccttaaattaagcagcatcaacaaatgtcaccacaaaatttctcttctgttcatctggacagcattttctaccatcatgacctactacaatttcatctatctcatgaggagcttcttaagtacgtccccctcatttataagactttaaatttcatactgaaacaaatgatatgcaatgcttttagagatcttaagataatctttgtctaaaaattctgtcaactagatgttcaaattgctactgaaaatggagatggaacacatacattaaatgattcaaatgatatatcggaattaccagtagctgtcatgtttgcccatcagatctgccctcaaaaaagtgttatgaaaatattcaaacattttttctccctctaactaattcctagctgttagcagaaccctctgtacacacacacacacacacacggcattcagatctaattagacaaaagaaatttcatttgtgaaacaggagaaatacctgaaattctgtgaaatattgtctcgcatagaaaatggagttgttacaagccaggagagattgggtgcctattttcaaccttcttaaagacaagaaattccaaccaagaatttcatatcctgtcaaattaagattaataaatgaaagagaaataaaatcttttccagacactccagtactaagagaaatccttattattaaaggcagtcttacaagagacccttcagggagttctaaatatggaaacaaaggaacgatatttgcatttacaaaaacatacttaagtacgtggcccacagaccctaataagcaaccacacaatagaaactacaaagcaaccagctaacaactccatgataggatcaaaacctcacatattaacattaaccttgaatatgaacactctaaatgctccacttaagaggcacagagtagcaagttggaaaagaaaagaaaagaaaagaaaagaaaactcatctgtctgcagtcttcaagagaccaatatcacatatatgacacccataggctcaaagtaaatggttggagaaagatctaccacataaacaaaaaacagaaaaagaggaggggtcattattcttagataaaacaaactttaaaccaacaactacttagaaagataaaaaagggcattacgtgacaataaagggttaaattcaataagaagacttaactatcctaaatatatatgcacccaatattggagcatctagattcattaaaaaaactacttctagacctatgaaaagacttagccacatgattatattgggggacttcaacaccccactgacagcattagatagatgattgaggcagaaaactaacaaagaaatcctggacttaaacttgacacttgaccaattcaacttaatagacatctacagaatattccatccatcaaccacagaatatatattcttcacatctgcacatggaacagactccaagattgaccacatgctaggccatggaataactatcaacaaattcaaaataccaaaataatgccaaccaaactctcagaccacactggaaaaaaatagaaatcaataccaagaaccttcaaaaccacacaattacatgaaaattaaacaacttgctcctaaaccacttttggataaacaacaaaatgaaggcagaaatttaaaaattcattgaaataaatgaaaacagagacatagcataccaaaatatctgggatgcagtgaaaacagtgttagaaagaaagtttatagcactaaacactgaccttgaaaagctagaaagatctcaaattaatgatattacgtcacacctacaggaactagaaaaacagaaacaaactaaccaccaagctagcagaagaaaaaaaataactaaaatcagtgtagaactgaatgaaattgaggctcaaaaatccatacaaagacacagtgacattacaagtttgtttttttaagggataaacgagatcaatagaccactattttttgttagtagattaacaaaagaagtgagaagatccaaataagcacaaatagaaacaacaaaagtgacattacaacagatcccacagaaatatgaaagagactattatgagcacctctatgcacacaaactagaaaatctagaggaagtggataaattcctggaaacatacaatctcccaagattaaaccagaaagaaactgaaaccctgaacagaccaataacaggttccaaaattgagtcatcaattaaaaacctattaactaaaaaaggccctgaaccagatggattcacagcccaattttactagacataccaattctactaaaactatttcaaaaaagcaagaagaaagatacctccctaactcattctacaaagtaggcatcaccctggtaccaaaacctggcaaagacacaacaaaaaaagaaaactacaggccaatatccctgatgaaaaaaatgcagaaatccttaagaaatactagcaaactgaatcaaagaatactaaaaaaagacagttaattcgccatgagcaaacagacctccctcttgggatgcaaggttggttcaacatatgcaaatgaacaagtgtgattcaccatataaacagaattaaaaacaaaaaccatatgatcatctcaataaatgcagcaaaccttttgataaacccaacatcccttcatttaaaaacccctcaacaaactaggcatcgtaggagcatactcaaaaataataagagcccctatgacaaacccacagccagcatcatgctgaatgggcaaaaactgaaagcatttcccttgagaactgggaatgctttctggaacattccagttttctggaacattcccaggaatgcccactctcaccactcagattcagcctattactggaagtgcttgccagagcaatcaggcaagaggaagaaataaaaggcatccaaataggaaaagaagaagtcaagctatctttcttcattgacagcagattatatgcctagaaaaccttaaagcctccaccaaaagactcctggaactgataaacgacttcagtaaagtgtcaggatacaaaagtcaaagtataaaaattaacagcatttctatacaccaataatgttcaagctgagagtcaaatcaagaatgcaatcccattttcaataaccacacactcaaaaaaaaagcctaggatttttttctaactaagaaggtgaaagatctcttcagattcagggagaattataaaacattgctttaaaaaattatagatgtcacaagcaaatggaaaaacattccatgcccatgggttggaaaaatcaatatcatttcaacagtcattctgcccaaagcaatctacagattcaatgttattcctatcaaactaccaaagccatttttcacagaattagaaacaactatcctgagttcttatggagccaaaaaaagagcctgaataggcaaaacaattctaagcaaaaagaacaaagccagaggcatctaattacccatctcaaactacacgataaggttacagtaactgaaacagcataatactgatacaaaaacagacatatagaccactggaacagaataaagaatccaaaaataaagctgcatgcctacagccatctgatctttgacaaagtcaacaaaaatacgcaatgggaaaagggctccttattcaataaatggtgctgggatagctggcaagccacatatagaagaataaaactggacccctcctctcaccatataaaaaattaactcaagctggattaaagatagaaatgtaagaactcaaattacaagaatcctagaagacaacctagaaacaccattctggacataggtcttgggaaataatttatgactaagtcctcaaatcaattgcaacaaaaacaaaaattgacaagtgggacctagttaaactaaagagcttctgcacagcaaaagaaactatcaacagagtaaaaagacaacatacaatggtagaaaatatcacaaactatgcctctgacaaaggtctaatatcaagcatctataaggaacttaattcaacaagcaaaaagaaaatagccccattaaaaagtgcgcacaagacatgaacagacacctctaaaaagaacacgtacaagtgggcaacaaatatatgaaaaaatgttcagcatcactgaacaccagagcaatgcaaatcaaaatcacaatgagataacctctttacaccacttagagtagctattactaaaaaatcaaaaaacaacagatgctggcaaggccgcagagaaaagggaatgcttatacactgttagtggaaatgtaaatttgttcagccactatggaaagatgtttggagacttctcaaagaacttaaaacataattaccattcaactcagcaatcccattactgggtatatatccaaaagaaaataaattgttctaccaaaaagatgtatgcacgtgtatgttgatcgcagcactattcataatagcaaagacatggaatcaacctaggttcccatcaacagtggattggataaagaaaacgtggtacatatacacaatggaataccatgctgccataaaaaaataaaattacctcttttgcagcaacatggatgcagctggaggccattatcctaagcgaattaacacaggaataggaaacctaataccatatgttctcactaataagtgggagctaaacattgggtacacattgacataacgatgggaacaatagacactggggactaatagaagagggaaggaggagaggagaaagggttgaaaaactaactgttgggtactatattcaggacctgagtgatgggatcagttgtaccccaaacctcaacaacacacagtacaccaatgtaacaaatctgcacatgtacccctgaggctaaaataaaagttgaaattattttcttaaaaatggaaaggctaaattccacctctaccaatatgtttacttaatttttatatcccccatcttactggtataaaaccaggaacatggcaaccattcatttatgtttgaagtgttcaaaaaatgagtgactacatcaataaatgtactcagaggaaagcacaggactttattatgtggggaatcaagttcacagaaggaagcagatgaatcttttgctgcaggctgctggattaggcagcactttttatttaggaagagtggagaccagcgagacaagggctagatttaggattagactgtgaaaatggtgatggtgggtaagatgatgtaatcctgcagcacactcagcttctcaccagaatgttgatgtggcttcttaaatgacacatgttttttctcttcttcatcattagcacaacataatttcccacttagacatcctatttcatatctttctcctaccttgcatttcttcctgcaatagcctgttactttattgaagcattttttgagtcttgccccgtctgtgcataggaaacaacattgaaccaaggttagtgcgtaaggaagagcagaagaggtaggtatgtggttccccacaagtcatggcctcctatggtcccaagtgaacattatgctgataaaaggaaactcagaggcccctccttgaaaaatatcccaaattaaggacattcaaaagcccaggctctcagccaatgtccagttgcctctgagaacattagaactgatatgacaaaagagaagagagaactcaattcctggttatcaaccagagccaagtcccacccctaggaccatggcaaagctgactctctccaccaagctccaaagtcagcactctctcagctccatctcagtctcatgtccccagagacggctaacatgtcaccatgtgcacaagacatgtcaccattggcacaactcagccaaagcaacttttgaaagaacatcacaaacaagactttttaacttaattcggtttcacactcactgatatgggcaacagaaatctccctttgacaagatctcatgggtctcagcaacaggtgctattgagaactccttcccttaacctggctcctcctgtctgtcactcatcacactccccttgatctcagataaatgtgttgcccagggatcaaattcaattccatgaatttggctctagagagctacattgtcaccttctcagagtaatgcactgaaattctaagtctcttgtttctaatccttatttgcccctctacccaaaatttgaacaagcccaaagaataaggttggagaagagagacatactctccctatcctaaacttcagaatcagggaacatctttgagggttagaggagtatattttggggccataaaaatacaatatgccttcttcctagcaagagagaaggtaactctcactgacagggcttctacgatgaactttgtgcttcgtgcttgtaagttcatgtaacctgtacatcaaatagaatcatgaaatatagtaattatactccttcacagatgagaaaattgagattaaaaggaaataatgtgcttaattcatacaacccgtcaatgatgaagacatattttaacctcacattgacatgactccaaaatgtgtgctattttaattactgttgtagtacaggctgaaaatgaatttgaatggaaaagggaatggccaggctctcaggtgaaaactgtgtccagcattataaagataattctagatgatgagttcatggatacttttgaaaaggactcctgagagtccactatagccctgacctcctcttacctccttgggtgcctctcttctaaggcatagactcaagtcaggcaaccaggagaatgggtacttttttatgattttggccaaatataaataatcttgaaagtcctgttcccactcttacaaatagtaatatctcttaggatgttatagtacatttggacaagttacctgtgagtacctcaaacagcagaataatgagaaccagaaacagcttcatatttacagacttcccaagagaaagaggcagcagaactttgtccagtggtctgtgtgccacaggtctttaaagatgatccagagttttgagagctatcagcgctcggagctctcattttaacccacacagacagagaggaattccaagtccacccccgtaacacacacacctacatccccaaatatggagctcacagtcccagaatgttccaccatatcatccctcctcccccttcctcaggatatgcgcccctagagagcaggaactatgactttccgtctgagcttccaacccatttgggtcaaggttggttggtcgtgggccttgggttgtgtgggataatcctgtcttattcctattgttccaatgttccatccggctactgctgcctctaacaaaactaacccagtttggaagataaattaagtcattagtcgacacagaagcatattcaacaataatttttttaatgtataaagcttccagatagtcattctaggagtaagattgcttttaggtttggctagataaattgatattatttgagagtttcccataaagacttgtccatctagtagagcaaaattcaacaactgaaagttttcaaaagatcaaatctccttagcacagcactcaacttattataaactggtctctgctctcctctcttgggacattttatggaaccatctatgtttctcccaaactagtgggtacaccttcctgaacttttacttccttaatctgtttcttttcacatttaaatccctccttacagattatattacactccccatcccctccatataattggtgctagtgaactcctggttttccttcaaaaccaagttcaatcatctctatataagtgaaagtttccctgacccaactaaacagagctgcaaactctcttcttcgcaccatcactgtatttgtacatatttttgttgatggtcacactatgtcatgttccaattatttgtttatctgcaatagtctgcagacccataaagggcaggtctctggtcttattagacttggagttctttttctttttttttttttttttgcagttgcaagatttaatagagtgaaaatggagctcccatacaaagggaggggacccaaagaggttagccgttgccggctcgaatgcctgggtttatatcccaatcattgtccctcctgctgtgctctcaggcaatagatgattggctatttctttacctcctgtttttgcctaattaccattttagtgagctctctttcctacctgattggtcacatgtgagctaagttgcaagccccgtgtttaaaggtggatgcggtcaccttcccagctaggcttagggattcttagtcggcctaggaaatccagctagccctgtctctcagtaccccctctcaacaggaaaacccaagtgctgttggggaggttggccgacgaccgctctaactgcttcctcctgaattggggcatagtaggggttgtgcagttgagatttcctcaggaggggtgccttcgatgtcattaacattggagcatgggctagcaggccggtccaatggtccacggtagctcttagtcatggacggcatctgtggctccatttgaagaatgatttgtagttttacagctttgattctggaaaagacaaacttaacaaggaggttaaagatacagggattgaaatgtatggcctgcagtgcaggggattatttctttggcacactttacaggccctgactatctatttgatagttttgaaaaggcctggtccagtaaataataatttagccatctgatagttgctatcaatgcctaagtgaaaggtttggtaaagggttttaagtaatttcaattggttagctgcaggcaaaagtattttttcttctttggtggctagccatcctgaggggaggaaagtatgtcctcttgaggttctccattctatttcttctgctgagtactggggcttggtttcctggagggggttaccccacactaggggtccttctataagcatttctaatggagggtcctgtcttgtggctcttttggcttcaacatctgcttggcagttcccttctacttccctttccttttttttttttttttttatgaccccggcagtgtaagactgccacctctttaggtttctgtacagccaataataatatcctaatggcttcttgatgtttgataggtgttcccttggaagttaggaattccctttctctccatattgctgcatgggcatggagaactaggtaagcatacttagagcctgtatatatatttaccctttttccttctcctaattctagtgccctagtgagggctattagttctgccagctgaacactagttcctggagtgaggggattactttcaagtattccattatcactgaccactgcataccccacttttcgaagtcctttttctacaaaggaacttccatcagtacataaggtgaggtcaggatcagtcaagggaacctctaaaggatccccttgagcagcgtaggtttgaacaattacttgctgacagttatgttctatcttttctttattgtctggaagaaatgtggctgggttaagagttgcacaagtgcacagtcgcagcactggcccttcaagtaatagagcctgatatttaagtaaatggttgtctgacagccacaagtctcctttagcagtgagtatgccattcacatcatgagatgtccacacagtaagatctcttccctgtattagtttaactgcttcagatactaagactactactgctgccactacccgtaaacaatgaggccaaccctttgccattacatcgatttccttacttaggtatgccacgggttacaagctcatccctcagacctgtgtaaggactcctagagctattcctgtttttttctgtgacttataaagaaaagtcttgcccctttgacaagcttaacactggggcttgggttagggccttctttagggcctggaaagctgcttctgcttcaggtatccatcttactaatgggtatttgctttctgagtttccttaattgtgtatataatggtctggctatttcgccatacctgggaatccatattctgcagaaacctgttacgccaaggaagcttttagttgctttagggttttgggatgaggatcagccagtataggctggatatgttcctcactgagggccctggtgcctttggataatttgagccctaagtatttaacctgctgtgagcagagctgagcctttggtttggaaaccttatagccacaggtggcgaggaaatttaagagtgcttgggtggcttgattgcacaaggtttctgaacgggcagctaaaattaaatcatccatgtaccaaaggacaagagtgtccaggtatgagaactggctcaagtcttaggctaatgcctggccaaatagatgggggttatccctgaacccttggggtaaaacagtccgggtgagttgagatgttgggttcgaaggatcttcaaaggtaaacaagaattgaaggtcaggatgtacagggatgcagaaaaaggcatccttaatgtccaggactataaaccactctgcttcctctggtgtttgggaaagcagagtatacgggttaggtataggtgggtatggagcgacaatggcctcattgataatcctgagatcttgcactaacctccactgtccgctgagtttctgtactcctaaaattggagtattgcaggggctattgcatggttttactaggccttgggcttttaggtccttaaaaatattttagagtccttgttgggccttgggtgtaagggggtactgcctttggtagggaaaggaggtgaaatcctttagtttaactcaaacagaatgggcattctttgctcgtccatgttgtccttctgttgcccagacttcaggattaattccttcctcaagcagggggacaataaacgggtgttctttctcctatgttcaggtgtataatggcccctgctttcgctagaatgtctctccctaacaagggagtggggctttcaggcataattagaaaagcatgtgaaaagtataaagttccccagtcacaacttagtggctgggagaagtatctagtgactggctgtcctaggaccccttggatagtgacagatctggaggacagttgtccgggacaggacagtaagactgagaaggctgcgccagtgtccaggagacagttagcctcctggctctcaatggtcaagcatacccgggactctgtgagggtgatggcatgggctggagcttgccctgggcaccctcagtccttctgctggatcatctggttagtggcttctgactcagaggaccttcgtcccctggggcagtgggccttccagtgattcccttgacataaggggcatggatgagagggtggcttatttctacttggacaatcttttttaaagtgtccttgtagaccgcactggaagcaagccctattaggcattcgatttgcccagtttttcccttttccaaagcctcctcgactaggagttcttaactcatagcacaaaattcatgctatatgctcaatacataatcactgaatggctgaaaagtactgaacaaattactgctagataaaatactccaacacagcaataaagttaattatggcatttcctttaaaaatgctgtttaccactttttgcaatttctaggcacctaattatagtaatgaggtcccatctaatccaaatatctttctgtgacagtatctggaagaatgttggaatttctgaaagctgtagaagtagccgttgatgattaaactcttatcacaacatagtcagggaaagagtaaggttaggaattagtattgtatatagcttactatggataccagtaaccagagcccttatccccctcagttagtagctgtataccttgtaatcctggagtggcacagaaaataaagattggtgaggcttacagaatctcatcaaatcatatttatcatatgaagacagctaagttaatgggtgcaggaaatttagccgcacgaagatcagatgtgtgaatatttattaagggctaggtgcagtggctgggattacaggcgtgcaccatcatgcccagctaatttttgtatttttagtagagatggggtttcaccacgttggccagtctggtcttgaactcctgacctcaggagatccacccacctcaacctcccaaagtgctgggattacaggcatgagccaccacgcctggcttgtttttttgtttttgtttttgttttaattttctaagtctttcttgctgagggtctgtggatcaaggaaatacttattcaaaaaacaggtattaagttcctgttaataaatacaagaagaaaagtgctaactgaatcacctgtgggtttaaagaccaccatcaaagctacaattttggaggacagccaactgctcccttgttctgtaattcaattttactcattgctgtaagggagttggttccatttctaaataaattaaacagagataacccaaggattagatgaatataagtccagctatgcaggaaatcgtttgccaccttagtgcacaataagaactaagaagttggactccagattagtgtatgggatttcttttagctttttctaactagaatcaagaaagatgagatatttgactgttctaaacctttacttcagccaagtatggtgctctggaagcttctcaaccccactcccactgcctccatgttcaagaccatcaaataagagggaatttcctctccaagtagatgtccatcttctacaacattttttcctacgtctgatagatacactctagcagaactccagtagcatatttcacccaggatacaaaggtgtatttgtcagcaccagtcctgctgatgtttttcctcaaattctgcattgtttctttccaaatctcaaaacctcccagaaaatccttcttgtcttttaaggctcagataaaaataagacctcctctgtgatgtcttcctaactcctctgatagacttgattaattactattttgaacccccacagctctttccatttgtatttgtaacactaatcccattcgtgtgtgtgtgtgtgtgtgtgtgtgtgtgtgtgtgtgtctgtgtatgaatttttttagcttttattttaggttcaggagaacatgtgcaggttagtcacataggtaaattgtatgtcacagggatttggtgtacaggttatttcatcacccaggtaataagcatagtacctgataggtagtttgttgattcccaccctcctcctacctcaagtaggccccggtgtttgtttccttttttgtgtccaggtggactcaatgtttagctcccattataagtgagaacacgtggtatttggttttctgttcctgtgttaactcacttgggatacaggcctccagctccatccatgtccctgcaaaaaacatgatttcattttttatggctgtgtagtattcgatggtgtatatgtaccatattttatttatccagtgtaccattgatgggcatttaggttgattccgtgtctttgccattgtgaatagtgctgcaatgaacatacacgtgcatgtgtctttatggtggaatgatttatattcctttggctatatacccaataatggaattgctgggtcgtatggtaattctgttttaagttctttgagaaattgccaaactgttttccacaatggctgaactaatttacactcccaccagcagtctaaaagcattcccttttctccacaacctcgccagcatctgttattttttcactttttaataatagctattctgactggtgtgagatagtatctcattgtggttttgatttgcatttctctaatgataagtgatgttgatctttttttttctttcaaatgcttcttagccgagtatatatcttgttttgaaaagcgttccccattgcttgtttttgtcaggtttgtcaaagatcacatagttgtaggtgtacagtcttatttctgggatctctattctgttccactgatctatgtgtctgttcttgtaccagtgtcatgctgttttggttactgtggccctgtagtacagtttgaagttgggtagtgtggtgtctccaactttgttctttttgcttagaattgccttggttattcaggctcctttttggttccatataaattttaacatagatttttctacttctgcaaagaatgtcagtggtagttaaatgggaatagcattgagtctataaattgctttgggcagtatggccattttagtgatattgattcttcctaccaatgagcatggaatgttttttcatttgtttgtgtcatctctggtttctttgagcagcactttttagttccccttgtaggtagaaatctttcacttcccttgtaagctgtattcctatgtattttattctttttgtggcaattgtgactgggagttccttcatgatttggctcttgtgttgaaggttataggtgtataagaatgctagtgatttttgcacattgattttgtatcctgcgactttgctgaagttgtttatcagattaagaagttgcctagccatgtgcagaaaattgaaactggaccccttcattacaccatataatacaaaaattaactcgagatggattaaagacttaaatgtaaaacccaaaagtataaaaaacctggaagacaacctagataataccattcaggacacaggcacgggcgaagattttagggtaaagatgccaaaagcaattgcaacaaaagcaaaaatggacaaatgggatctaattaaactaaagagcttttgcacagcaaaagaaactatcaacagagtaaacagacaacctacaggatgggagaaaatttttgcaaattatgcatccaacaaaggtctaactaatatccagcatctataaggaacttaaacaaatttacaataaaaacaaacaaccccattaaaaagtaggcaaagaaaacatgaacggacacttctcaaaaaaagacatacatgcagccaacagtcatatgaaaaaaagctcaacatcactgaccattagagaaatgtgaattaaaaccacaatgagataccatctcccaccagtcagaatggctattaccaaaaagtcaaaaataacagatgctggccaggtacagtggctaacacctgtaatcccaccactttgggaggcctaggcaggcagatgacctgaggtcaggagtttgataccagcctggccaacatggcgagaccccgtctctactaaaaatacaaaaattaatcagtcatggtggtgggcacctgtaatcccagctacttaggaggctgaggcaggagaatcactggaacccaggaggcggaggttgcagtgagccaaggctgcaccattgcactccagcctgggcaacaagagcgaaactcccatctcaaaaaaataaataaataaaaataacagatgctggcaaggttgtgaagaaaaaaggaatgcttatacactattggtgtaaattagttcaatcattgtggaagacagtgtggaaactcctaaagacctaaagacagaactaccatttgacccagcaatcccattactgggtctatacccaaaagaatataaatcattccattataaagacacatacatgcccatgttcattgcagcattatttacaataacaaagacttggaatcaattcaagtgcctgtcaataatagactggataaagaaaatgtggtaaatatatgtcatggaatactatgcagccacaaaaaagaatgagatcacgtcctttgcagggacatgaatggagctggaagctattatccttagcaaactagcacaggaatagaaaaccaaataccacatgttctcatttacaagtgggagctaacttatgggaacacacagaaacacagaggggaaaaaccacacactggggcctcttggagggtggagggtggggggagggagagaagcagaaaaaataactaatagacactaggcttaatatctgggtgatgaggggcgggcacagtggctcatgcctgtaatcccagaactttggaaggctgaagcaggcagatcgcttgaggtcaggagttcgagaccagcctggccaatatggtgaaacctcatctctactaaaaatacaaaaattagccaagtgtggtggcatgtgcctgtaatcccagcttctcgggaggctgaggcacaagaatcacttaaaccagggaggtggaatttgccatgagccaagatggcgccactgcactccagcctgggtgacagaacaagactctgtctcaaaaaataataataataataaatctgagtgatgaaataacctgtacaaccaacccccatgtcacacatttacctatgtaacaaacctgtaccccctgcacacataacctttgatcttaaaataaaagtgaaaaaaaaaagtgtctgttcatgatctttgcctttttttttttttttttttttttgacagagttttgctcttgttgcccagcctggaatgcaatggcatgatcttggctaactgcaacctccacctcctggattcaagcaattctcctgcctcagcctcccaaatacctgggattacaggtgcccaccacctcaaagtaaatttctttgagtttcctcaacacagctattgtgaattatctgtcagaaaagtcacatatctctgtctctctggaatggcccctcctgccttatttagtccatttggtgaggtcatattttcctggatggtgttgatgctagtagatgttcttcagtgtctgggcattgaagagtagggtatttattgcagccttcactgtctgagcttgtttgtacctgtccttcttgggaagtctttccgaatattcaaaaggtcttgagtgttgtgatctaagctatatctgctttagggggtaccccaaacccagtaatactgtggttcttgcagactcttagagataccaccttgatggtcttagacaagatctgagaaaattctctggattaccaggcagaggttcttgttctcttcccttgctttctcccaaacaaacggagtcagtctctctctctctctctcttttctgagctacctaaagctgaggatggagtgacataagcatccctgtggccaccaacactatgactgcactgggtcagacctgaagccagcacagccctaggtctcacccaaggcctgctgcaaccactccctggctacttctcaaggccctgaggctctacaatcagcaagtggcgaagccagccaggactgtgtccttcctttcagatcataaaggtaccccaggcccaggatggatacagaggttcccatggggactccgagactagagtaacaaaccttagaaatctacctggtgttctattgtactgcagctgagcttgtactcaaaccacaagactcagtcctccccactcttccctctcctttccaaaagcagaggagccttacttcgtggccaccaaaaccacaggccacaaggaatactgccaggctactgctgatgttccctttaagccccaagggttcttacgtcagcttgtggtgaatgctgcctggcctgggactaatccttcaagaaggtaggctcccctctggcccatgacaggtccagaaatattcaagagtcaagtcctagaatcgaggaccccaagagcccacctgatgctctacctccttgtggccaagctggtacctaaggtgtaagacaaagttcccttcattttttctctgcttttctcaagcagaaggagttctgccctatagccaccacagatggggatgtgttgagtgtcacctgaagccagaaagtctcatgggttcacccaaggccatcagtgtggaacctggttatcactgctggttattcagggcacaagggctctttagttagcaggtgattaatgctgccaggactgggtccttcccttcaaggcagtgggttcccttctggcccagggtgtgtctagagatgtttttcaggagctacgtcctggaagagggtctgtcaactatctggtgcctgatcctgctgtggctgagctggtatccaagatgcaagacaatgttcttcctactcttctctctcttctcctcaagtggaaggaaatggtctcttttggagctatgagttgcgcagcctggggttaggggaggatgatgttagaactcccttagctgccctagctactgttttagtaggtcatgtgccccccagtccactgtctctaggcccagttcagcactaggacttgcctaagagttgcagtccttggggtttagactgcctttcaagtttgcttagagacccaaagcccacagtggaaagctttgcatgtattcaagttccgaccactgagatcagcaattcccctctggttagggctggtttaaatgcttcctctgtgggtgggcctcagctgcatttggtccagttttcctttctgctctaactgggcagcactgagttcactgcctcacaattgccgagttttccatccctcctccagcacccagagattatctttgcatgctgctaccgacagggcagtgggagtggggagtgcagggtggcagctgtgattgaggactgtgttttctatttcttcagtgcctcattcagtggtaggaactaaaatcaagtgctatgattcttattcttatgaaggtgttttttgtgtagatagttgttaaattggtgcctttgcataggggagggaggacgatcagcggagccttccattcaggcatcttgctctgcctcctttttccataaataatttttgggagtctagtatgttccaggaactctttcaggtcctgaaaattagacatgcattcatggagcatacattcaaaagtgggaagcagataaaaaatcatatgaataaatatatagtatgtcagatggtgacagggctctggagcaaaagaagatatagaaagaagatgacaaggccaggcacggtggctcacacctgtaatcccagcactttgggaggctgaggcgggcggatcacctgaggtcagtagtccaaggccagcctggccaacatggcgaaacaaaatacaaaaattatccaggaatgatggcgggtccctgtaatcctggctacacaggaggctgaggtggaagaatcacttgaacccagaggtggaagttgcagtgagccaagatcatgccattgcactccagcctaggcaaaagagggagactccatctcaaaaaaaaaaaaaaaaaaaagtgctgagcaaaaaagagtacagttttaaatgaggtatctgtgaaaagactccttgaggcagtgacatttcaggaaggatgtaaaagttatctggggcaagagagtgtcaggcaatgagaagagcaagtgcaaaggccctgaggtgggaccatgcccagtgtgttcaagaagtagcaagaagaccacatggataatgtgaagcaatgaggaaagagaaaaaggggattatatcagaaaagtaatgggggtgcacatttggggttacaataaagaattagacttttcctctaagatggaggttattggacagtgctgacatgatctgatgtattttcaaaagatgcctctggcttctgtggtcaaaacagattgagagggagggaaagtataaaagtggaaaacctgttgcatgggcattacaaaatctaagtgacagctaatagggcttagatagagagcatcagagaagagggtgggaaatggtcagactcttacatacctattgaaaatacagtcactcgtagattgaagagaaaggaagaagtcaagataacatcacagttttagtctgagtaactgaaagaatgaagttgtcactgacagagatggatataacaggagaaagttcagattggtctttttgcttgagggaggataaaaacctttgtttgggatacgtttgctttggagtgctatagacatctaagtggaattgtcttgtaaacaggagagatttttaagccatgagactgaatgggattgtcaaggctatgactgcagaaaagagcctaatgcctgagacctagaactccccaatgttgatgaataagaagcagcaaaggacactgagaaggttcattccagtgaggtcggaggaaaaccaagagaacatgatgctctgggagcttaattaaattaagttcatcaaggaggataaagcaccaaatgctgctgatacatcaagatgaggcatgagaattgatcagtggcctaccagaatcccagctccatgacctcttaccagatgccaagtagatgacaaatgcatttcaaatgcattgcttactttaatcatcacaagaacactatgaagcagaaattaatatacctcaatttttaaaactggaaaactacaatttagggagctaataatgtgcccaatgtcacacagccaataaggaattaactgggatcaacacaggtctgcatgaacctaaaattaaaggccttagccactatgctaagctgcctctccagctgccttccatgggtcaattctagggagactgaagacaaagtattcaaataaaagatgttgctttattcaaaaaatgtattggccatgtgcttggctggacattcttccatgacctactcctttatactctattcatcacttacagggcagcctgttttaagagaattcatatttcttatttctgaagatgacattattacatcctggaagaaatattgattgcccatttcagtatattcctaagtctttttgttcctctgtgtcaattctttttcttttattattatactttaagttctagggtacatgtgcacaaagtgcaggtttgttacataggtatgcatgtgccatgttggtgtgctgcacccgttaactcatcgtttacattaagtatttctcctaatgttatccctcccccctcccaccaccccacaacaggtcccggtgtgtgatgttccccacctgtgtccaagtgttttcattgtttaattcccacctatgagtgagaacatgcagtgtttggttttctgtccttgcgataatttgctcagaatgatggtttccagcgtcatccatgtccctacaaaggacatgaactcatccttttttatggttgcatagtattccatagtgtatatgtgctacattttcttaatccagtctatcattgatggacatttgggttggttcgaggaagtcaaattgtccctgtttgcagatgacatgattgtatatttagaaaaccccatcatctcagcccaaaacctccttaagctaaccaacttcagcaaagtctcaggaaacaaaatcaatgtgcaaaaatcacaagcattcctatataccagtaacaaacagagagccaaatcatgagtgaactctcattcacaattgcttcaaagagaataaaatacctaggaattcaacttacaagggatatgaaggacctcttcaaggagaactacaaaccactgctcaacgaaataaaagaggacacaaacaaatggaagaacgttccatgctcatggataggaagaatcaatatcgtgaaaatggccatactgcccaaggtaatttatagattcaatgccatccccatcaagctagcaatgactttcttcacagaattggaaaaaactactttaaagttcatatggaaccaaaaaagagcccgcatcgccaagtcaatcctaagccaaaagaaaaaagctggaggcgtcaattctttaatgtcaagcagcctttatgcaatcttggattgggcacaagaagcacacaatctcctcattttcaaagcccttcatggctaagcaatagagttcctcttgagtaggctggaacagataatgaaatgttgctttttagatgtggtcagttaaaaataaaatcacctatcaacatttgttactgtacctccagctgtgatcaatagtacaaattgcttttaatatcttacttataaatagactttaagtatgtttcatttctgagaaatgttctctgaattctacttaagatgttatctttccaaactgctggacgggctgaatccaggcaagaaatgggattgcaaattcccttgcacgaagacttgatgggtgagtcaaagcaagattcccttgccattctttgtttagaggtgagaggaaggttaactagcattttatgctataaaaatcagacacaaagataagcaaaaagaatacaacagaagccactcattatttcagctctctgttaacactttgatgttcacttctaaatatgcttcctcaaagtaatttcttttcacaactgggtaggagataagataaagcaaagtgagcttgcttgcttttcatccactcagttaaaaacagtcttccagttgacactccctgatacatgcacactcaggcacacacaaaagtctgcactcatccattaacctcaagaaagagacctgttgacaaaatagacatacaccagttcagaggaacctatgtcacctgtccctagtaatctacttttaagcctaaatatatcaacagtcaatttcaggaaaattaacattaaaaaaatttagatgaacaataggaatgaatgaacttaaaggaaaagaagctaatatcaaggacagaagataattatttaaaatgatgagtgacaaacttgactaaaatgcacaacctcttcataacaaaaagcatgcaggagaaggtacaagtcagcacaaggttaaaagacaatcagagtagaacaaaaattctatgtgcatgataccacaaaaagattgctatccataatctatatgaagaataactacaaatcaataagaaaatgacaaatgacccagaggaaaataggcaaacaatagtatagcagcaaaacattgtaagcactcgtttcagaaggttgatatagattcagaaatatgatattccctttaagagaatctgcttttaatccataaattgtcttacaaactagttttattagtttaatattaaaggacccattagtgggtatatatccagaggaatataaatcattgtattataaagacacacacctgaaaatgttcattgcagtactattcacaatagcaaagacaaggaatcaacctaaataaccatcaatgacaggttggataaagaaaatgtggtatgtatacaccatggaatactgtgtagccataaaaaagaacaagatcgcatcttttgtgggaatatggatggaactgcagaccattatccttagcaaactaacgcaggaacagaaagccaaataccacatgctgtcacttataaatgagagctaaatgatgagaactcgtgaacacaaagacgggaacaagagacactggggtatccttgagggtggagggcgggaggagggagaggagcagaaaagacaacaaacctctgtgacacaagttttcctatgtaaccaaccttcttatgtcctcccaaacctaaaacaaaagttaaaaaaaaaaaaaagacccaattggagttgcaatttgctctttcccattctactgcatttctgaaacccaaagtgtacaaagaatgtgtcttatgttttatgaaatgtacatttgggcccccatttttttatttgtataacaattgtaaaacactatctaaaggcataaaatggctaggatgagaattactattggttcataattatatttgcttaattactgaagatgtaactgtactcgctttaagtatgccatttgactattgcccttctttttgtccagagccatcaaaagattaaagtatttgaaatgaataatgtaatggttttgtcttcctgctacagtgtgtttcaggttattttctaaaatcataatgaaccctgtttttttgttgtttttattattttttgataagtaaataatgccacgattggtagatctaaaactgaagaaggagaccctatggcctcaatccagaatgccatagcatgctaaaatgagaacttcctccaggtgtgtatgtgtgtgttcagggccacctatgtatgcccgatacgtccagtcttcgttgatgaaaattgttagaggtcagtattacagaagataaaacagaaaggccatatgttaataatgagaaataagtggttaattcataattagtgaatctggtttcagcactttggccttcgaggtggtcaaaacaggtctccaatatgaactaaggattgaaaagattaaaattatttttttaacaaaaattaagctcaaagagtcttggatgcttcagattgactctgcttctggcataacttgaatagaaaatcatataagggtctatgatgggcaccatgcccagagctagttggtttaaatgtcattctattttggaccctaaagataaacatggcctactgtgattccgtcctgcgtggctgttctctggagcagtagtcattaatctttgcctgccttctctcccacctaggtgtgtgccaccaccccatggtgacatgagcttcattaattaaaaaaaaaaaaaactttttctctcttttcttaatagaaatgaccttggaaaatttctattggtctgtcttcaagttcatttctctttccatatcatatctacatggctgttaagtccaaagtttattatttaaataaataaataaaattgataaaactctagccagttgatcaagaaaaaagagacaattaccaaattttcaatatcaggtataaaaagaggacatcattacattaaaagttttgtgagagatgattctatatgccaaaatttttgacaacctatatgaaatggataagtttcttaaaagatacaaattaccaaaactgacctaagaggaaacataaagtttaaacgatgctgtatcaattggagaaattgaatccatagtttagtcttctcacaaagaaactttcatgccttgatggcttcactggtgaagtataccaagaaataataatggcaattctacactaactctttcagaaaataaaggaggagacacttctcaaatcattcttcgaggccaatattaccttggttccaaaaatatgcaaagatatcacaagaaaagagaactatgagccaatatcctcatgaacataatttcagaaatctataataaaatattagcaaattgaatgcggtgaagaatagaaaggatcatagaacaggacaatatgatgtttatccccagaatgcaaagttgatgtaacatcaaaaaatgaatcaacgtaattcaccatattgatggactaaaggggaaaaacatatgattatttcaataaatgcaagaaaagcatttgacaaaattcaaagccctttaaaaaaaactcatcaaactaggagagatggtaacttcaagctgaataatgctagctacaaaaaagtaactacagataacatcacctttaacttagaaggctcatgtctttctactttaattaggaacaaatggtaagttgaccacaaccacttttacttaacgtcatactgaaggtcttagctactccaaaaaggctagaaataggaataaaatgcatgcatttagaaaaggaagatacagcagattctatttttagtttttaatttttataggtacatagtagatgtatacatttatggggtacaaagttattttgatacaggcatacaatgtgtaataatcatattagggtaaatggggtatccatcacctcaaacatttatcttttctttgtgttatcaacattctaattatactcttttagttatatttaaatgtagaataaattaattttgactgtagtcaccctgttgtgctattgaatactacattttattcattctgtcttactatattttcatacccattgaccatcccctcctcccagacccccctactacccttcccagactctgatcatcatcattctactttccgtcttcatgagctcaattagtaaaactttccttttttgcagataacatgatcatgtacataggaaaccctaaagaatccttggaaaagctattacatctaataaatgaatttagcaaagttttgaatgaaagtctgtatacaaaaatatatatgtgcatattttagcaaaaaattagaaaaagaaattttgacaaaaactaccctttccataatagcatcaaaaatgaaatatttaggggccgggcatgatggctcaccaatcttgtaccccaacaaccagaatgattattttttatagttttatgtatagtctattttggttttaaaatggcaaaatactatatgattttatataaaaactaaactaacttagaagtatgcagtaagaacgtgaaggtcaaacacgctgtccataacacttaggaaaatgagatcaacagtaaatagaagactggttactcatcctacaagaaatggtgatgaataggcctgcaaaatatcctgtaactcctctagagggtgctcactagcaggacattcacatgctactccatgtgatgttagattattgtaaagcattatgttcctataaagggtggcgtgacagtccattaccaagcacgagaccctctgctgatctgtcctaacaagtggaattatgatatgcagcaacacaggaaccaggcttacgctagccacattgcagagagacattgccagaatctcacttgtagaggccaccatcatatacatcagtaagcctctctccctggatccacatctccctctataaggagccctgttaaccccatcatttaagggcttcatacatttgccttatatttctctcataaacaaatcaatgagttccagacttttggtacaaatgtatgaagacagaagaaatcatatttcagtcttaaaagcctaatcccagaagtgacacccatcacttcacattccattgccaagagcaaatcacatgaccacacagatgcaaggggaatgagacattggcaaccacttcccagtgaccattatatattatagaaggggggcatgcatgtaagaggaaagttggtcttctctgacagagacgtagaattctacaaacataggggaggacgttaaaaggtgctgagcagataaaggtcaaatgtctgttacagaaggacacaggcaccaaaagataaagagatactcctcaatttatgagggagttatgtcccaataaactcaccataaattgaaaatatcatacgtcaaaacttcatttaatacaactaacctacctaacatcatagcttagccaagcctgccttaaatgtgctcagaatatttatttgagcacatagttgggcaaaatcatctaataaaaagactattttataataaagggttgaatatttcctgtaatttattgaatactgtattgaaagtgaaagatggaatggttgtatgggtacttgaagtatggtttctactgaatgcatatggctttcacaccatcgtagagtcaagaaatcatgtcaaccatcataaataggggactatctgtatgacagtaaaaaccattttgttacacaaatagcaatcatcaaaaaagaaaacacagcaatttctgttgcatatatccaagcattcaacaacaaaagacctttcattttaatcatttttttaagacacacggtctgactctgttgcccaggctggagtgcaatggtacaatcatagctaactgcagccccgacctcctgagctcaagcgatcctcctgcctcagtctcttgagtagctgggactacaggtgcgcatcactatgcctggctagttttttctagaggcagagtcttgctatgttcctcagactggtctcaaactcttggcctcaagtgatcctcccaccttggcttcccaaagtgctagaattacagaggtgagccacagcacctggccaagaatagacattttatatcaaagtaattcaagtatctatatgaacaagtaatcgtgcaactaggtaatcagggctttgaccaattttgaattacacaattaaagtgctaatatgtattgtattatactgtatttgctgtagcaatgcaaaaacttcattgttctttgtccccaaatacaactgtcacttatatttcactgtttatgctgctagtacatagctttataaattaatctatcttgtttctgacacttatacatatttcatcctctggggacctggaggagcatattctttgccccacctcacaattacctatgcatatttctcagtaacaggcataaggcacgctgcacaatcttagctgatgagataagaagtctctcctaaggctttactcgctggaccatggcagaaatgtggacaagagtggttgcagaacatgctgtgcctggggcaaggaccctctaatagaactagaagagataagtcacaggtacaaggagtgtgcaatcggtctgttcagccacagttgctattagaggcccctgaagaatttgttgtactttccacgctaggctacctcgatcacagaaatcagcctagagtcatataacccaaagggggagctgacattgctgctaagccctcctcctgagggccttttatcatctcgtcctgtaacctacctttgccaagacaattccttcaatctttgctttgtttcagggaacagtaatcctactaagactctaacagtagggacgagagaaagggatggaacaaaggagtgaggcaaggaggcatcagatgaaagtgagctaataatctgttggcacccatcacatgctgagtacttccacttacattatcacacttaagatgcacaatactttgggcatgatgtcactgccagcaaatctgaaattaggaaactcaggcccagaagatatgaagtgacttttccggggtatcattaatgcaccagcagtgtaagctaaattgaatccattctgcctgacaccaaaatcgtattcctttccttccctcccacaattgtttccattggtgtataaaacctctaaagatcaagatgtggcttccttctttaaagaaataaagctgaggctaggtagtgacaggtgggggcaagtatgaccatctatgaatgttaaatctcaccctcaatcccaccttgtagtttaccatctatagacttggccttctttagatgaagcagtgttgtaggggcctttctcaactggtgttcctcattcgaaccacagaacacagaaaatgacttaggtgactattttcccaattcttccaaagatgatacatatgaataccattctaggtgcttagaagaaaggttaatccaaacacaatggatgtgtttggttgttaggatttaatttgcttgcagaaacccaattgagacatgctggtagggaatctctaacattggtccactgtagaagacagaggagacgatcaatttattttgtctatcaacctgcagaaataaagagttttggtggaactgtaggtagagaaagaaggaggtaccttcccatggccttgatgagcctgagtctttctaaatgccaggaaggaaaactactcaaattagctgtaacagggagttatcacaacaatttttattctcttgggaagtgctaaaacaaatatatatggaaatcttacagccaacagaaacgaatttcccactgctttcctccctcccaaactttcccactgtccctaattgaaaccccattggaaggtaactaaatcctgtacaaccagaatctcctcatctaacttttcatttctccctgtgttaaattaatcctgtttctccctcatggattcaccatcaacttgtactctcaagctgatgctgttcattttcccacttttcatgactcaaggccaaaaggttggtatggcagcttcctcccttcccaatgttattttgaaaacattgcttctgtagtgtaaaatccccaactagtcaagactcaagtcagctcttttcaatgcctcttcaaccatctttattgttatattttaaaaagcagccccccatttattgaggactttggcactttgtttagaatgtatctattctgattattgcctttattattggtgacttcagcatccatatggaaacactatccagttctacaaatgttcagttatttgtcctccttaatgtcaataatttacctgctattctactcctgatttctggccatagagctgtccacgtcatcatcaatgaccactccacacatgaactctgaactcctaccaccttctctgatcacacccaggcaccttttcagctccctcattttattatagaacatgcatccgccagacgcttcctccttcacttttctattttttttttttttttttttttttgagatggagtcttgctctgtcgcccaggctggagtgcagtggctcgatctcggctcactgcaagctccacctcccgggttcacgccattctcctgcctcagtctcccaagtagctgggactacaggtgcccaccaccacgtctggctaatttttttgtatttttagtagagatggggattcaccgtgttagccaggatggtctcgatctcctgactttgtgatccacccgcctcagcctcccaaagcctccttcacttttctttattagcctcaaccccatgattcaccactccaagtactcccttgccagcatcctcaaatcccaataccatttttaaaattttttaaagaatttctgcacccacctgtgtgaaaagttcaacccccagatccttttaactgtttgtcttctccacagacaaattcaggctgatgagcagtgctggaaaaagtgcacagctgcgcagattagtggcacctgcattcatgatctccagttttcacaaagccctcagcagcagccacttggttccctgtgtgcagcgttcagtggaaaactccatgagggcaagaacaatatctgcttttactcattattttaacccacttgaatgttaagctccatgatgacagggactttctgcggtatagattattaccggcccctaagacagtttctggcacataatagacgctcaataaatactcagtgaaggaataaaataaataggaggttaaaattaagtgatcaacagtagtccagggtattaaagagactccccttaaaagctgcaattaagcagagtcatgagaggtgagtaggagctagcctgagaggaaatggaaaagacagtattaaaggcaggttgaacagcgcctctgtgatccctccctcatgctttacacacaatcgttctgagtattctgtactcaaagcccttccattctctccagttccactgccgctcctatgcaccctcagatgcagcctctgtatttcagccagaatggtagctctaaaaggtaattctgctcattattttcagcttctatttggaactcctctcagagctctctaaatttcctcaagatatctatcagttaaatgtgttcacccagtggtcttccatgtggtttgtatatgccaaggtatccccaaaaccctttgaaggagtctgcaaggtcaaaattattttcataacaatatttttaaaataactagtttcataataatattttgccttttcacaaaattgacattggctctgaaaatgcaaactgaagcagataaaatagctagtgcctcaccacaaatcaaagcaggggcacaagtctataattagaagttggattctttatcaccaagcacttgtaatttttttaaatgccactcttaagaatatacttgacaaagtataaaaatttttaattttattgaatcccttgagtagattttgttctaaggttaaagtaaattaaagtggaaaccaggcctggagaatccatgagcagacaaggcctcttaagtgctcataacttttcttgatttgcaaacgtaagcaaaacttaattggagctatttcttgtaaatgcctatattaaagaaaaatagaacttaatctcaaccaatcaaaagcagctaactaactcgtaattatataagaaggtacttcccagcaggatagaccaaataagacaaaatttgtaactataaccaatcaaatattttatttgtattatttccacacttactgcataaaagcgtgttccttaccacttttttttttttcttgagacagggcctcactctttcacccaggctggagtgcagcggcatggtaatggctcattgcagcctcgaactccggggctcaagcaatcctcccacctcagccttctgagtagctgggaccacaggcacccaccatcatgcctggctaatatttttttttttttttttgagatggagtctggctttgtcacccaggctggagtgcagtggcgcaatctcggctcattgcaagctccacctcctgggttcatgccattctcctgcctcagcctcccgagtagctgggactacaggcacccgccactacgcccatgcccggctaatttttttttcttttttttcttttttggtagagagaagggtgtcaccatgttgctcaggctggtttcaaactcctaggctcaagcaatcctcccaccttggcctcccaaggtgctgggattactggcaggagccaccatgtccagcttccttaccacttcttaagtgaagaccccgaaccacttctggtttggagttgcccaattcatgcattgctgtttgctcaaataaactcttttaaaaatttttattatgcctcagtttaccttttgacactatgttctgagtaatacaaggaaaagtacatataaagcacttctgcagtataacaagctatgatggttgtcgccagaaaaatcacttaaataactatttggattttaaactgaactaggcacttttttatgaaacatcatttttatttgaaagaatgatggaaaaagtatggttattcagacttacatacttggcagaaattttctcaaaaattaacaaagtgaacttgtcatttcaaagaaaatagctagcaatattagttaccaatctattcttataatgtgtggctgacaacaagaagtgaagtcactgctccctttccttgaacctgggaagatctttgtaaccaacctgaccagtacaatgcagtggaagaaatatcaggtgatttccaaggcagaacagcttctgactggccctctgtctccagccaccatgttagaaggaagttcaggccacatggagacagcaaggcctctagctcacagtcagcatcaactgccagacatgtaagtgaatgggcctccagatgattccagtccccagtctttgaggcttcccagctgacgtcactgacattaccatgcagagacaagccatctctgctaagccttaatttttaacccatagagaccatgaaagaataacaaatgatgattgttttgaagccactacattttggggtaattcattatgcagcaatgggtaagtaatcctggcatcacatgtttttcaagaatgggaatatgtctttttcttcctgtctttcatgtctaagccctctatcagtggtgcttgttgtgtggagtttggagcccaggagtagtcagaaaagactttgatgacacagggttgcttgtagaacatctaatatgagcaactcctaccttgtgctcactgaccaggcccacagaaaagtcaacaagggcaaaagttctttgcctcacagcacagaactgctccttcctctctggtgcctctccaaccacaaaattccttgtccctgtctttgccagtctcatgttaagaaaccccatagacccaggtattctccaatcttgatgatagaaggggaaactgaggaagaggtccagctcacaacattcttaccagcccagggggaaggccaagatctccacagagtcataaactctaggccaagactatgcctctcccaggaatatccaagttggatataccatatattttatgcagataaaatagctagtgccttaccacaaatcaaagcaggggcacaaatctgtaactagaagttggattctttatcaccaagcacttgtaattttttaaaatgccacttttaagaatatacttgacaaagtataaaaattattaattttattgaatcccttgagtagattttgttctaaggttaaagtaaattaaagtggaaaccaggcctggagaatccatgaaaagacaaggcctcttaagtgataaaacctgtattattcctacagagtctcctctaatgtcagcaactgtcctggtgtctcaacctgtctttaccaccttgatttagccatcatgaaagatcagccaactctatgttattgtatttttatttccatctctactttttattacaacaaaggtcctacttcgttgaattttcccttgcttttaaaaaaacggaaggtctttaacttgttctgaagaaacctcctgtgaatttcaaaagggctccctatctgttgcatgtggggaagggccacgcacatccacattcccttcgttccagggcactggattttcaaatattgagttcttgctgtcttcagtctttgaataaagctcacgtggacaactatgaagtttaaaagcataggttgagtttggggtatagtcatgagaatagagaggaaagagcagaagtacagctcattgcagaggacaagcatcatgatattcagaacatttgatatggagtgatatggggtaagagtgagctgggttttattctgggaaatcacccagccctgaaaaagctatttatattcttttgttcactttccttatctgtaacacagagaccgttatgccaggtttcctagctactttagttgttgtgaagcagcatattataaatatcataaaagattatccagtgctaggtgccatggtgcacagctgtaatcccagctacttgggaggcagagtcaggaggatcacttaagcccaagagttcaaggctgtactgcactgtgttcacacctgtgaatagccactgcactccaacctgagcaacacagtgcctcttaaatatgtatatgtatatatatatatatgtgtgtgtgtgtgtgtgtgtgtgtgtgtgtgtgtgtgtatatatatatatatatactcttttaaatttactctgttttaaatattttgaggcagaagcaagacgttttgatacagaaagccagcaggttgctgaattacaagactgaagctgaggaaactgtgtttatcaatagagatgcaccgctcattcttatagagggaagatacaaagtaactctattaagtcaagaatttctatatgttttatttactgcaatatcctcagtacatagacagcagttgacatatagtattgatcatagtatctaatgttcaatagatatctgctgaatgaactgaaaaattaataatgttgagcaataacaggtaatcactgtaagataacattctgaggagactaaaatttgaagaatgcctacaagagagggagatgcaaagggaaaacatatcctaaaaaatgaaatgaaattatccttaagagaaaaaagaaacaccagtatgatcaaagattgcaagaggtagaagacaaaactgcataaagtaaaacaaaatgctgaactcttgaaatgcaaaaatccaaaaatcctgttgcctgttttttttttgtttgtttgtttgttttttttgagatagagtttcactcttgttgcccaggctgaagtgcaatggcaccatctcggctcactgcaacctccacctccttggttcaagtgattctcctgcttcagcctcccaagtagctgggattacaggcgcccaccaccatgcccagctaattttttgtatttttagtagagacgggtttcatcatgttggccaggctggtctcgaactcctgacctcaggtgatccacccatcttggcctcccaaagtgctgggattacaggcatgagccactgcactcggctgtatttttttttttcacttatttagaaggctgatttattatcacctcctgccagtcacgggaatgagacagaatcaccttgagagtatctacagggagaatctggagtccaaatcccttcttaatcaagaaatgctctttaatcaactccctatatatagggaggttgatgctgggacaagaggggctgaataacttggggttctagtcttggatatggaatgggggcaagtgtgtacaatctctttgattttccccagggcttccatcaatattccaaaagactagaaattctggacagcagcttttcccttctctccctttcacacttcagtgacttctgtcttcatcttaagacactaatctacacccaattttctctccttcctttttgcaggaatgctattcattcaaaaatgctgggatgaaagagcaaacttgcaaggatatctgctacaataattaaagagaaatagatgcctataattaaaaacattgctgcttgtctctgaaattatttgaacactgtatacatcataatgtacataatcagtttccatctgatatcccagacatctaatcctggaaacaacgtctaatatctctaccccaaagcaatagaattagagctggaaggggcaggtaagcaacagtgtggacctttctcagcagcagtgaacttggggtgctcacaacctgtgcaaaaccagctgtggtggctaaggattgcctatgtcacctctcccccaactctaggcaatgcagcttggggatagactccttccacttgggggaagaagagggaagagtacagagggctttgccttgcaacttgggtaccagctcagccacagtaaagtaaagtatcaaaagttacccagcatggtgccagctgtggtggccactggacttgcccttcccccaactccaagcagcctggcacagagagagagactccttttgtttgggggtaaatgagggaagagaagaagaaactctgcctggtaacccagggaatttggccaaatttaaaccccagcccactaaggtggttcctctaggactcagcgagagttgcagtgtttctgagcttagggcaccctctagtgctgatatagtttcaataatcacaggctcaaatcacaacactcaatctccttcaaatacctgaaaagccttcccaagaaggatgggtgcaaacaagcccagattgtgaaggctacaatatgtatctaactcttcaatgcccagacatcaacaaccatcttcaagagttaagaacatccagggaaatatgacctcatcaaatgaactaaataaggcatcagtgaccaatctgagaatgatggagatatgtgactttttagacaaataattcaaaatagctgtcttgatgaagctcaacaaacttcaagacaacacagagaaagaattcagaattacatcagagaagtttcacaaagaaattgaagtaatttctaaaaaatcaagcagaaattctggcactgaaaagtttgattgtcaaagtgaaaaatgcataagagtctttcaacggcagaattgatcaagcagaaggaactggtgagaactggctatccaaatatacacgaagccaaaaaaagaattaaaaaagaataaagtatgcctacaaaatgtagaaaatagtctcaaaagggtaaatccaagagttattggtcttaaagaggatgtagagggagagaaaagggtaaatagagagatcttttcctcagcacatggaacattttgagagatcagggtagaaaggtcagagaaataaaaacaaacaaccttccaaacctcaagaaagatataaacatccaggtacaaaaaggtcaaaaaacaccaagcagattcaacccaaataagactacctcaaggcttataataatcaaactttcaaagatcaaagataaagaaaggatcctaaaagcaccaagagaaaagaggcaaataacatataaaggaactccaatacatctagcagcagacttttcaacagcaactttacaggccaggagggagtgggaaaacatatgaaaactgctgaaggaaaaccaaccttcaacctagaatattatctccagcaaaattatcctctaaacatgaaggaaaaatagtctcccagacaaacaaaagctgaggaatttcatcaataccagatctgtcttacaagaaatgcccatgggagttctccaacctgaaataaaaggacattaactaacaacaagaaatcgtctgaaggtataaactcactggtgatagtaagtacacagacaaatacaaataccctaacactgtaattctggcatatgaaccgttcatatctttagtagaaagactaaaagacaaaccaatcaaaaataataatgacaacaactttttaagagattgtataaaaagatacagagacaataaaaatcaaaaagagtgtagagtgtagagtggttgtctctttgcttgttagtctgtttttcttttctttttaatcaggattaagttgtcatcagtttaaaataagtggttataagatgttatttgcaagcttcatggtaagtacaaaacaaaaacctgtaacaaatatgcaagaaattaaaacatactaccacacaaagtcaactttacacaaagaaagatggaaggaagggagggagggagggagggagcagggaagggaaggaagggagggaagggagggaatggagggaaggaggaaaggagggaaggagtgagggagggagggaaggagtgagggagggagggaaggagagaggagaaaaggagggagagaggagaaaaggagggagagaggagggagggaggaaagggagggaaggagggaggaagggagggaaggaaggaaggagggaaggaaggaaggaaggaaggaaggaaggaaggaaggaaggaaggaaggaaaaagaggaccgatgaagcaaccagaagataaatttttaaatggcagttgtaagtccttatctattaataagaacattgaatgtaaatggactgaagtctccaatcaaaagacatagagtggttgaatggataaaagagcaagacccaactacatgctgcctatgagaaactcacttcacctataaagaaactcatagactgaatataaaggaatgaaaaaagaaattctatgcaaatagaaaccaaaaaagaagttattatacttatatcagataaaaatatctttcaagacaaaactgtaaaaagagacgaaggtcgttgtttaataataaaggagtcaatttttgcaagaggatataacaattataaatatatatgcacccaacactagggaacacagatatataaagcaaaaattattagttctaaagagagaggtagaccccaaaacaataatagttagggacactaacaccccactttcagcattggacagatcatcaagacataaaatccacaaagaaatatcagacttagtctgcactataaaccaaatggacctaacagacatttatagaacatttcatccaacagccatggaatacacattattttcctcaccatatgaacattctcaaagataaaccacttgttaggccacaaaacaggtctcaaaagaatctaaataattaaaaccatatcaagtatcttttatgaccacagtggaataaaagtagaaatcaataacaagaggaactttgaacactatacaaacacatggaaattaaaaaacataatcctgaatgaccgttgggtcattgaagaaattaagacagaaattttaaaatttcttgaaacaaatgaaaatggaaatacaacattccaaaacctatgggatacagcaaaagcagtactaagagggaattttatagcaataaatgtgtatatcaaaaaagtagaaaaaatgatcaataaagcagtctcagtatcaaaaattatgccatatgtcattcccttccccaatatagaaattatttagaaatcaataacaaaaagttcaagaaaatgtatattatgaaaaaaatcatgtaagaatttcaaaatgttttgcaccaaaataaactaatactaactggttataaaatgtttgaacaagatctagtttcagacactaaaaaagataagacatcagtctgaaaagagcccctatcagagcaacatgaattctgctaaaattgaagcaagaacaaacatcaaatgtacagtgaagcttgggtagaagaatgatgaaatcattgatgctttacaaaaagtctatgggacgatgccccaaggaagtcagcagtttgcaaatggataactcattttaataagggatgagataatattgaagatgaagccaccagcagcagaccacccacatcagtttgggaggaaaaaattaatcttgttcatgccccagttgaaaaggactgataattaacagtaaaaacaattgtcaacatcatagacttctcagttggttcagttaatggaaatctgactaaaaaattaaagaagaacaaactttccacttgatgggcgccaaaaccattgtgccaaaatcagctacaaacaagagcacagctttcaatgaaactttaaacaagtgggatcaagatcctgaagcatttattcaaagcactgtaacaaaagttggaatctggctttaccagtatgaccctgaagacaaagcaaaatcaaagcaaagagatggaagtgatccagtccaagcaaaagctgaccagttaagaacaaaagtcatgtcaacaatttttgggggtgcacaaggcattttgcttgttgactttctggagggccaaagaacaataacatctgcttattatgagagtgttttgagaaagttagccaaagctttagctgaaaaatacccaggaaaacttcaccagagagtccttctccaacatgacaatgctcctgctcattcccctagtcaaacaagggcaatttttcaagcgttttgatggaaagtcattaggcatccacattgccatcctgacatggctccttttgacttctttttatctcctaatcttaaaaaaaaatctttaaaggacaccaatttttcttcagttaataatgtaaaagaacactgatgtggttaaattcccaggaagctcagtccttcagggatagactaagtggctggtaccattgcttacaaaagtgtcttgaacttgatggagcttatgttgagaaataaagtttatatctttatatttttatattttaatgtcatcttccacaaactgtttgaagttccctcataactaaaatgtccccacatgctcagataagaaacacatttctcaaccaatgtttctcagatattaaagtacatacaaatcacctgaggatcttcctaatacgcagattttgattgactcattctgagatgaattgaaatcctgcatttctgacaagctctccggaagtgttgatgcttctggtctttccaccacactgtgaatagcaaggttcaaactaattcatatgtcagaaaagatgacacagtggaaattgaagtgtttatttttaagtgaatgattatgataacaaaacactgcaaataaaaacttatgaagtccagctaaagctgcatataaagggaaaattagagtcttacccacttggttatactgaagaaaagctgaaaatgtatgagataacaacacaaataataagttagaaaacaataacagaataaaatgaaattttattcaaagaagttcaaagaaaggaagataaagctgagaggagaaaataattaaatattttttaattttcataatatttaaaataaaatataattaaataaaaatcaaacatagaatcaacaaaaccaaaagctgattttgaaaagaccaattaattaattcactataggaataacaaagaaaaaattgaaaacacattacccatatgaagaataaaacacgtagccatcactacaaactctatagatagtaaagagatcaaaggacatattgtgagtgaccttatgccaaaaatgaaatttagaagaaataaacattacttgatgtgacccaagaagaaattgaaaatttgacagttctaaattgttagggaaattaaatcttaaatctttaaactcagttgagtttttctgctacattccaatgtctgatccctagctctatgggtttcaacagacagttgtagaagcagcagaaaaatatccttgctcttatattacagctaccgtggtgtgttcttgaagtccagcatgtctaatcatgggatcctgtcaccctactttcctgactatgaaagaactagcagattctctgctgggccagtttgttggaatgttctggaagtcattctgggagaccaagcccacagtcagcttctgtagagagtttataagcacataattctgagtattaaaaatatttctgttgaaaatagctagtgtttttcatttcccaactgatacacataaatgcaacactttgcacatgtgaataatttgtctttttacaaaattatgctacactgttgatagattcattccatatatacatgcaacatacttaatttttcataactttccaattcttattaactcaactttttgttccataataactgtgcttctctttgtaccagtactttccatattcttattgctttgggactagcaagacacaatgaggtgaataatgttatttcaatgcatcttaaaacaccagaaaccaattaatatgcgatattcaggattaactgattccaaagggctgttaattccatctcttgatattgacaagtagtaagtaaatatgcctaagcttgattatttttgttcatagaagtaaaatatacatttcataaagtgaaagttcataagatttgcttttattgttttaaaaaataacagttaatttaaacaaaactgaggagtcattggatactatagtagctaatgaaatcctaagaagacatgaatttcaggaaggcgaggaaccagggaaactcttgaaacttgaacaattaataatattcagagccaatgagcttcaatatctgagtttcttaggaaatgtcccaaattagcaggggaaagcatctgattggtaggcttggttctattgttacacctggatcaatcagctacgaccaaggaatctgagcagtacactataaaaattgctgcttttaattatttcaaccattgtggaagatagtgtggcaatccctcaaaaacctaaagtcagaaataccatttgacctagcaatcctattactgggtatatgcccaaaggaatataaatggttctattataaagacacatgcatgcatatgttcactgcagcgctattcacaataacaaagacatagaatcaacccaaatgcccatcatttggccatttggataaagaatggataaagaaaatgtggtacatatataccacggaatactatgcagccataaaaaagaatgagatcgtgtcctttgcagggacatggatggagctggaggccattatccttagcaaatgaaggcagaaacagaaaaccaaatactgcatgttctcacttataggtgggagcaaaatgatgagaacacatggacacacagaggggaacaacacacactggagcttactggagagtggaaggtgggaggagggagaggatgaggaaaaataactaatggacactaggcttaatagctgggtgatgaaataatctatacaaccaacccccatgacacacattacctatgtaacaaaccagcacatcctgcacatatacccgcgaagttaaaaaagtttttttttagttgctactttaaaaggatgtgggaatcattgtaaactcaaaagttaaagatgtgccaagagctgtctcccacgaacttgtttaacaaacgtactgactttgtatgttgatccaatacccatgctggccactggacataccagtacaaacaaggcagaatcttcactctcctctagctcttctaattctcatgcactaagtgccaaccttagcataactgggctgacaatcagtgaatcaaatatctaactcttatcctactccaacgttaagaaagagacatgcgactgggtgcggtggctcatgcctggaaccccagcactttgggaggccaaggtgggcggatcacttgaggtcaggagtttgagaccagcctggccaacatggtgaaaccccgtctctactgaaaatacaaaagttagctgggcatggtggtgcatgcctgtagtcccagatactctacttgggaggctgaggcaggaggattgcctgaacctgggaggcggaggttgcagtgagtcgagatcacgccactgcactccagcctgggcaacagagtgagactccatctcaaaaaagcaaaagagagacacatgcaaagggcttgctctttctttctcatcttacctatcttatgttttcctccaggatcaagagcaaggaatttgttgcatagaggtgttcaagaaagggtgttttcaaacagagtcagaaaaaacacaactatactgcgagcagcatacaaacctgctttggctgcacttcactgctcatggcataaggccacgaagaggccaataaaggctggagctcaggagcatcaacccagattcaaggcttcctctctggcacccaaccatgaagctcctttttcctatctttgccagcctcatgctacagtaccaggtgaacacaggtaatgtggattcccaagtttaagatgggtagatgagaggaaccaaggatttggctgcccatgacaatggaaacccaaagagaggagactgaaagattagctgttcaaaaagatggctaaagagcttacctattgtatcagtcatgcactgatacattctcataggccccaactgccagattgtgtccagtggaaacacccaggaagctacagagaaagcagggtattttttgtctattcagaaactatccaaaatataatgctgccttcctgccctgtatatgtctatcatgctaagactaagcccaggtctacctccttttagctctatttctatcttaaaagccctttttttttaaaaaaagtcctggggtacttgtgcaggatgtgcggtttgttacataggtaaatgtgtgtcatggttatttgctgcacctaccaacccatcgcccaggtattaagcccaggatgcattagctatttttcctgatgctctccctccacccaacaggccccagtgtgtgttgttccccttcctgtgaaaccacctcttgaagcaaagtttcctatcagtttgtgcttggtgtagaaaggaggaagttcttccctcatgctcaaaaaaaaaccctttcaagatcaagtaaacaggcctgtgttctccatcttgaattctttcaggttttccagagcctttatcgcttctctcagactttgtcttcctgaaaacccccaaactaccataagggcatctaggaatgcattatagcaaaaggctaagccaggggattaaccattgtttttggaaaagaaaggagaagcactgagatttgtttcagaatacaagaatcatccagctatttgaaaaaattagcaaagggtttcggggcagggaaagtggaagtgtcaaagatgcttctaatgtttttatcttctaatgtttttatcttgggaccctaggaaaagggtagtaccataagcaagtatggctgtgtcatcttgggtaaagtcacttaaccactttgaacttcaatttcacatgagtataatggggttaatcaatgcagctgattccaatataagaatttttctgtttcccgtttgatgagaaaacaatgtggaaatgtatgcaaatatgctttgaaaattagcagatgctacataaatctcttgtaatttagggaaaatcattgggttattaagatgaacaagggagaaaagctttcttgattcagaaaaaagaaacacgagacattaggatggaaaagtcattcagcagataaagataaggtactaagccgagcaggaaatttagaattatagataacaatacagaagttaccttggtggatatgaggttaaggctaggataatgaatgagacttctgagagatagagtgtccaaagaggctagaagagatagaacaccatgcttcaggaatcacagatctagtgattgttgagaagagagaagtcatgggctactgagtttggtgaaaagataagactcctgaaaattctattgattctcttttgaacttctttcttaaattagttttatgatggacttggctctcattggtatttcccaagattatggagatgggatagtgatgtctgacaagtacctaagatgctaagttgaaggtctaaaattccatcctaaaagcaaataattactctatcatctacgtgccctttgcttcttaaagttactcaaggaaggcagactaaacaggaaatttactttggattcaagaggggcatagagacgctctcagcctgcccatttgccttcatcaacattcctaaacactgggcttaaaatgtagtatgagtaaactctctcttagtctatccatctcccactagcagttttaacatcatctctagttattaaccttggctcaatggctttctctttttttatacagaatttattggcttgagacgctgtttaatgggtttggggagatgcagggatcactgcaatgtggatgaaaaagagatacagaaatgcaagatgaaaaaatgttgtgttggaccaaaagtggttaaattgattaaaaactacctgcaatatggaacaccaaatgtacttaatgaagacgtccaagaaatgctaaaacctgccaagaattctagtgctgtgatacaaagaaaacatattttatctgttctcccccaaatcaaaagcactagcttttttgctaataccaactttgtcatcattccaaatgccacccctatgaactctgccaccatcagcactatgaccccaggacagatcacatacactgctacttctaccaagagtaacaccaaagaaagcagagattctgccactgcctcgccaccaccagcaccacctccaccaaacatactgccaacaccatcactggagctagaggaagcagaagagcagtaatgtggatctttcccttaaaactccaagttcctctctatttttgctatctataaaatgacatagaactgtttcctctgtcatcagtcattcaataaacactgtttgagcacctacagtttatgtaatattatcattctcacaagagcctcacagagggggtagagctagggagggatggaattgtttaagtttagatgcccaggagaaagtaagcctcaggagggtgactacagcatcgagtttgtcccaagcatggcctagattaggcctctgtagcaagcatttatgtctctcatatggtgtgtttttcctggagcaacagtaaggaaagcatcaggagatgtattttcttttctcatgtatttgggaggaaaggcccaaatgcaaaatagaatatgtaggaatcagaaaaaggttaaattaattgtaataatatatttttgtttcgttttgttttgagacggagtctcactcagttgcccaggctggagtgcagtggtgtgatctcagctcactgcaactccacctcccgggttcaagcaattctcctgcctcagcctcctgagtaaccgagattacaggcgcacaccaccacacccagctaatttttgtatttttagtagagacggggtttcaccatgttggtcaggctggtctcgaactcctgacctcgtgatccgcctgcctcggtctcccaaaatgctgggattacaggcatgagccaccacacccaaccaataatgtgttttattgaatgcaatatatccaaaacatgatcatgttgacatgtaatcaatgtaaaaattatttatgagagagtttaccttttttggactacatctttgaaatctcatatgtgtaattacacatagagcacatttctattcatactagccacatctcaagtgctcatagtcatatatgaatagaggatttcatagcatattgaacagcaacaaggctagagagttttagggcacaagtaattatagtgactcttaggcataggggatgcccctaatccagaggagacaggcatatttctgagggctgtggcatataatttaagagtatagaaattcaggtctgatatgcccggactagcatcctagattctggcactttttagctgtgtggtcttgaacaaatcatttatccacacataagcatcagtttatttattcataaaatggagatgtgaacattatattatatcccagaaatcagcaatctcagatcactcttcctcttattgcccaaattacaatggcacagccacctattctagttttttaatagctttattgaagcataattgatatacagagaattgaacatatttaatgtgaataatggcatgagtttgggcatatgcaaaatcctgtgatactatcaccacaatcaaggtgatagacgtatacatcacctcccaaagtaacatgaccatatttgtagaaaaccctgaaaacttcacgaacacacacacaaaaatgtagaactaagaaatagattcaaaaaagtcaacatacaaatatcagtggcatttctatacacttaacaatgaaccattccaaaagaaaatcaaggaaacaatctatttacaaaagcaacaaaaagaataacataggaataaacttaaccaaagaagtgaaagaggtacattaaaaacttaaaaatattgatgaaaaaatcaaaggaaacacaaataaatggaaagatattccatgtttaggtattgaaagacttaacattgttaaactgttcattctgtctaaagcaatctacagatataatacatctccccccttccaaatcccaatggcattttttaaagaaatggaaaaaacaatcctaaaattcacagggtaccataaaagacccagaatagcaaaatcaatcttgagtaaaaagaacaaagctgaaggcatcacactttcttatttcaaaatatattacaaaggtatagtaattaggccaggcgcagggactcacgcctgtaatccagcactttgggaggccgaggcgggcggatcatgaggtcaggatatcgagaccatcctggctaacacggtgaaacctcgtctctactaaaaacacaaaaaacaaaaaatagccgggcgtggtggcgggcgcctgtagtcccagctacttgggaggctgaggcaggagaatggcgcgaacccgggaggcggagcttgcagtgagccgagattgggccactgcactccagcctgggcgacagagccagactctgtttcagaaaaataaataaataaataaataaataaataaataaataaataatggtgttgggaaaactggctacccacatgcagaagaatgaaattggatccttatctcaccccatataaaagaaatcaactcaaaacggattaacgacttaaacataagacctaaaactgtaaaactactagaagaaaacacagtactgttctgtatttaagctccatgacatcgttctgggcaatgatttcttgcatatgaccccaaagcacaggcaacaaaagtgaaaataggtaactgcatccagattttttaacatattcttctctgctacatatcacctacctccattcaaaggtcacctttccccatcctactcattttttaatacagtgtcactctaagaaagacaaagatttttcatgatgccccacagtgattctagaatataactaaaaaatattttcctggaagtttttgcacaacagaaaggagttgcaatacaaagcataagtttaacacctgctagatatgtgttctctgaggaaccccaagcctacctgatgggtgtcagattctctccctgctacagctatttgtcaaactcttgaaagtccagctttccttcccatggaaggaaaattcccacggaatgctctcttccgtgtttacccacagaaaggagagaaaggttctttctcacacaagtctaaggccttcctctaagtcaccttttcctatcatagaactcacccagcacttctcaggataaatgatactgcagaatatgagtttgcttcagggaaatcccatacccactgtgaaaaatatggtaactctccaatatcagttctccccctttgctaagtaatagaaccctccaaatattaggttgacacaaagccgaccagagaaaaggctgaatttcccatctagaactggtcattcttcaattcagaccagccataactggacacttttgcaaatattcattaatagtcttggtgaaaacctcagatttccattttgccaaagtttccaaaggaaaagagggcctttttctaagccctgagagccccacagtgacagtaagttctcccttggaattcaccctggcatacctcggtgctaccccagatcctttccctcaggggctatgagattaggtttcatggccgaatgtgacggttcatgcctttaatcccaacactttgggaggccgaggcaggaggatggcttgagcccaggagtttgagaccagtctgggcaacatcatgagactctgtctatgtaaaaaataaaaattaaccaggtgtcatggtacataactccagtccctgctactgtggggcaggggctgtgggggctgaggagggaggattgcttgagcccagaaggttgaggctgcagtgagctgtggtcgtaccactgcactccagcctgggcaacagagcaagaccctgccttttaaagaaaaagagaaaggaggttgggcatggtggctcatgcctataatcccaccactttgggaggccgaggcaggtggatcacctgaggtcaggagttcgagaccagactggacaacatggtgaaaccccatttctactaaaaatacataaattagctgggtgtggtggcgggcacatgtaatcccagctactcaggaggctgaggcaggagaattgcttgaacctgggaggcgaaggttgcagtgagtcgagattgtgccactgcactccagcctgggtgacaaaagcaaaactccatctctaaataaataaataaaaataaaaaagagagagagtgagattaggactcaccctggccatcccaggtcctgccactccaggtcctgccactcagggactgtgtgactctatattttttttaacttctcaggccaatattagaacccaatctgatcaaattagaaacctatgaacattccacttactagcagtgcattcatggagcacttcacagggagtcaccaaagtatcaatcaatcaataaactactaccctaccctgaactattaggttggtgcaaagtaattgcagtttttgcattgttggaatttgctgtttgatattagaatgcgttcttaaataaatgtggttatgttacactttttttttttttttttttgagatggagtttcgctcttgttgcccaggctggagtgcaatggtgtgatcttggctcaccgtaacctcctcctcccgggttcaagctattctcctgcctcagcctccctagaagctgggattacaggcctgtgccaccatgactgactaattttgtatttttagtagagacggggtttctccatgttgatcaggctggtctctaactcctgacctcaggtgatgcacccgcctcagcctcccaaagtgctgggattacaggcatgagtcactgctcccggcctatacatcattttaataggcatttctcactttatgttttttgataatgacttattacttgctgttgattttatgtttattttagactatggaaatgatgtcagacaaaaagaaaattcaagcgattttcttattcaagttcaaaatgggtcgtaaagcagcagagacaacttgcaacatcgactgcgcatctggtccaggaactgctaacgaacgtacagtgcagtcgtggttcaaaaagttttgcaaaggagaggagaacctcgaagatgaggaatgtagtggccggccgttggaagttgacaaccaccaattgagagcaatcattgaagctgatcctcttacaactatacaagaagttgctgaagaactcaaccttgaccattctatggtcgtttggcatttgaagcaaattggaaagatgaaaaagctcgataagtgggtgcctcatgagctgagcaaaaatcaaatcatcattttgaagtgtcgtcatctcttattctacgcaacaatgaaccatttctcaattggattgggacatggcaatgaaaagtgtattgtatgtgacaacctgctacaagcagctcagtggttggaccaggaagctgcaaagcacttctcaaagccaaatttgcaccaaaaaaaaaggtcatggtcactgtttggcactgtgatccactacagctttctgaatcccagcgaaaccattacctctgataagcatgctcagaaaatgagatggaaatgagatgcaccgaaaactgcaatgcctgcagccggcactggtcaacagaaagggcccagttctttacgacaaggcctgacctcatgttgcacaaccgacacttcaaaagttgaatgaattgggctacgaagttttgcctcatctgccatattcacctgacctctcgccgatcgactaccacttcttccaactttttgcagggaaaatgtttccacaatcagcaggatgccgaaaatgcttccaagggtttgttgaatcccaaagcacagatttttacactacaggaataaacaaatttattcctcattggcaaaaatgtgttgattgtaatggttcctaatttgagtaatcaagatgtgtttgagcctagttatagtgatttaaaattcacggtctgaaatcgcaattacttttgcaccaacctaatatgtatgcaggtgaattctgtctgtctttgctaagcagtgaggtgatcccgtgcttaatgatgttactgcaagcatgacagcggatagaagcggggagggccagtgatgaagataactattagagagggcatcccagttgattagaagcccatccctaactaactacatcacttctaaaggcctgatttccagtccagaactactttgaaaatgttgtttatgaactcaaattgttagttgtaaaaattatgaaatgaaagactattatgagcatatataaaataaattagccagtaaataacctaagatgatgaagaaaagagcactaaataaaaccataaataaaaagttgggagcttggtaatgtccagaaaaaaatatatatttactgtaacaaagcaaaggccttttgttagtacatgagactcagaatgccttaaggaatgtgctgggctctagagggcagggcaggcacacagcagctggcactgtttgtccagactcctgcctggacaagttgaattagaaaaatccaagcaagaaacagtgtcactactggcttccctgctctctactcatctgctcagagagctgcatgctagtttggcctgtcctgcacccgtagaggacaataggttatctacatccttcaccactaagtgagccaatgggctgaactgtgttcccctcaaaattcatatgctaaagccataacccacaatgtcactgtatttggaggtaaagcctttaaagaggtaattaaggttaaaagaggtcatatgagcaggatcctatccaacataattggtatctttgcgagaagaggaaaagataccaaggatatgcatacacaaagaaaaggtcatgttagggcacagcaagaggtcagccatctgcaagccaaggaaggaggtctcaggagaaaccaaacctgccagcaccttgatcttggacttctcgtcttcaggactgagagaaaatgagtatctgctgtttaagccacacaggctgtggtattctgcgatagcagccctagactaatacaggccataaaaaagataatatcctttcttccttctttctgagctctgggtaaatggaggtcagataaagccaggtgtgatggcacatgcctgtattacccgctactcaggaggctgagacaggaggattgcttgagcccagtagttctaggctgtagtacactgtgattatacctgtgaatagccattgcactccagcctgggcaacatagtgagaccctgtcccctccccaaccaaaaaaaaaaaaagaaaggaggagggggaggaatgaggtaggaacaataggaacaacagatgctttttttttttttttttttttgagacagagttttgctcttttcacccaggctggagtgcaatggcgtaatctcggctcactgcagcctccgcctcccaggttcaaacgattctcctgcttcagcctcccgagtagccaggattacaggcacccaccaccatgcctgactgatttttgtatttttagtagagatggggtttcaccatgttggccaggctggtctcaaacacctgacatcaggtgatccacctgcctcagccttccaaagtgctgggattacaggcgcgagccaccgtgcccggccaacagatgcctcttaaaacaccctgagcctctgcctttattctaaatttgtcagtcacaggcccgggagaaagctgagcaacttcaataggatttttaactcaaatctaagacagaagtttatataaagttgtagtcagactcggctgtgttcagaaagtatatttcttccattgctcagcaattatttattagcatctattctggtctctgggcaaacattaaggactaagaaatgaatgaactctaatcattttcattctttaaaaattgtgcagccaagaaagagaaataaataggcaaatgaccacataacagcaagacatgtatagtgaaagtcatgctcactgcaataaaaagaacctctagctctgagtgaggaagggggagtgggtgctgaggttgtgggaaagaggaagcgtgggtagagtgaggcagactgctgtggagtggagctgtgggagtggcttagagcttgcaggagtaagggaatgaggtgagagtggaggaacggcagagtgcatattctcagttgccagagattctgggcagcttctttcgatctttgaggatttgggcaggaaagggtgagaaaggcccatctaacaatcctgcgcttcataatcccctgaatccttgaaattattactaaagcttaatgctgggaaagatctctgattcccctgaatctgatttggcaagccaatcaatcatttgtgttaattgggaaagaaatcaaatatttctgtgtgaatatactcatctcaaaacattttcaagataaagtgttttacaaactatgcttctgagtcaataggattcagctgtttcgttttcatttcagcaacttagaggaagtttatcttcagaaaaaattgctataagacacttcctataagccagccctgtgccaaattatttacatgaatcaccttctctagtctttaaacagccctattatgaatggacaattatctcaatttgacagatgatgaaactgaggcttgaagagattaagttacctaagatcacacaatatgcctccaaaattcgaagagggccgaaggttgtaattgtgcaagaagaagcaaattttctatctctttgaaccatagactgtggatccactgcaaccttgctgaaatggaagtctttgttgtttcatgggggttttgctgaatcttctggcttgtagcaagaaactactttatcttcaccagatcttatcagcacattgtatacctgtgtgatactctgtgtgctaataaaattatcaagcttcctgtgggtccaaattatggcaaaaacgtaagacaaaatgataatcccagcactttgggaggccgaggtgggtggaacacaaggtcaggagttcaagaccagcctggccaacatggtgagacccccgtctctactaaaaatacaaaaattagctaggtgtggtggtgcgcacctgtagtcccagctactcaggaggttgaggcaggagaatcgcttgaacatgggaggcggaggttgcagtgagctgagatcacaccactgcactctagcctgggtgacagagctagactccatctcaaaagaaaaaaaaaaagaaaaagcacacgactagttatcatagatactgttggctactgtttcctctctgttgtgtgggtctgagcaaagagagggaatgggatgcaccgtgctttcagctctctatagtctcttctggatttcagtgtttcagcacagccctaaaaactaccacatgattatgccccacgtaacagtcagatcaccttgtctctagagagaccacgcatccataacgaagaacctcttataaccatgggttccacatctttacggcttaatcactgatgctctcagtgaacctgaaaattgatcctgctgaacaagatcaataaacagagttttgattcaaaggcagcccaatgagttaataagtgctccatgacaatgccaaagaggattaaggaaagaatagcaacctggaggaagatgtatagaaaagcagaccaggtgcggtggcatgcgcctgtagtcccagctacccaggaggctgaggcaggtgaatcatttgaacctgggaggtggaagttacagtgagccgagatcacgccactgcactccagcctgggagacaaaacgagactctgtcaaaaacaacaacaaaaaaaaaccaatattaataatgcaaatatttgagttacagggcatttttaagagccagatacagtactgggaaccttgagtatattatctcatttagtccttaaaacaaccccatagactttatataaataatacaactgaaagtttaacttaagttgctgaagttcacagataagcagtagaatcaggattggaacccatgtctcatcatatcagagaccctacgcttaagtgctatgcttccttgactctcactggcaacagctttggtgcatgtacctaatgccagttatatcataaaggatctacatggataagcttatttcatactcttagaaatggtttggaagaggccaggcgtggcggctcacacctgtaatcccagcactttgggaggcctaggcaggcagatcacgaggtcaggagatcgagaccatcctggctaacatggtgaaaccccatctctactaaaaatacaaaaaattagccaggcatggtggcatgcacctgtaatcccagctactcaggaggctgaggcaggagaattgcttgaacctgagaagcagaggttgcagtgagccaagatcacgccactgcactccagcctgggtgacagagtgagacttcgtctcaaaaaaaaaaaaaaaagtttggaagaagctatagaagtctcgatattactggtgacccagtataaggaggagtggtgaatatccctattctaaaggatttcctaatcctgaaggatttggacagctcctgcaattgccaaatgtaagcggcctgaaaagttcacacttagattattgcctttatttttggctcccacactgtaaaagaaattagaattagagcacagatacaaaagctatgataatgaaagtcctaaaaaaaattccattaagaaacacacacatataagtcagaaattcattgggaatacctttgcattttaagagatgagaaggaaagagttaacagtagtcctgaaatcaattctctccctttaacaggagatacttctggcaggaaagaaaaaaaaaaaaaaaaaacttgactctgactctgtcagatctccttataacatgctaataagagaccttctggtaaatatgctaatgatattcactagcagaggggtctttatgtagcagaatgcatctgctcagtcctcaattgcttctggtaaacaaacttagagtctatgaatttacagggcatggctccttgaaaaatgtcatgtgtttgtaatgctaagtaattgccagagaataaaatggagatgtttctagctaaaatagcccctttgggtagctgatgggcacccatgcatcacagacatcacttagagatctttcatgttaaacctatcccatggcttattttcatgaggcaagaaaggacctgggaagtggtgtggacatcccagacttttgcatttttacctgcttcgtaattacccgtatccttgaaattattactaaagcttaatgctgggaaagatctctgattcccctgattctgatttggcaagccaatcaatcttttgtattaatcaggaaagaaagccaatatttctatatgaatatactcatctcaaaacttttcagaaaagatattttccatacatggaaatagcttaattaactttttctgattatgaggttacttatagtcattttgaacactcagacaaaacagaaaactttatggaagataaaataagaataacaaaatctttcccaaagagaaagaccattaaatttttgtatatatccttccagagaatacacaaattatatgtatatatattttacatgtatacatatataacaaagactagcttatactacccacgctttcctgtcatttttcttttctacctaagatatcactgacagtcttttatataataaggatagtcctcaattatcatcattgtttaaatggaattctaatgtgttaagtgccataaattagcagattctctattgatagacatttagcttacttttcacattctcactatgagtaatgctaagaaggcaatatagttcttgcaccttcatgaacatattcttttatgctatgtgcattattttgggtcaaagggcaagcagagtttcatttaattttgttttagacatgggctatatattgacaaattgccctcccaggaacagtacacagtttttcttatgttgcctcacccatgccagcagtagctagaaaatgcatttccaaagactggtgctaattttctgtgcattctgtgagtgctcagtcaatttaagcaataaccacttagagtaacaaaatctattcaccctaatagcagagatttctacttcatccctggctcactgcccaacttttgatctcatctaaggccaataaatgtagctccagacaagtgacacaggtagctctgtccccatccaatctacccagctacttctcttaaggcacgttctgatccttcaagcatgaagttcttgcctctggcttttgtttctctcttgtttctggcttcagtgaccttgagtaccctggaatcttccatattgagaaagaaatgatagaggggaggggacatggaaaaaagaattaaatatatctatttttaaaaagaaagaaaattttagaatggacatgtctagaaggaggaggaaacagaggagggggacaggtataaaaactggacttctctgaatatactctgctttgaaggtttgactttggaatcatctacatattttatctaatacaagaatatcgaaacttaaatggcaatcccaaaaatctaaaaggaatagaaatcaaattagcctctgtaataaatgggttgtataaccacacaaaggactatttgaaatgactttcaaagagtaatttgagaatacttccttattggaatataacctaaaaacagaagaattgcaaactgttttcaatgttttcagtaatcatattgagactttaatacatatattgtgggataaaggaaatgaatgttggtgtcactgatagagataagaaataaaagttcaggtaaaaattctgtaaatcctaaatttgaattggaattttatattttatttttaaaatacctttttctacccccatccactgaaaagccctagaaatattggccaacctagtagaaatgatttccctctcacccgggatattatctctaaatataatttaccaaagtcttattgaagaaattgctgtttctgagcttgaagcaactatacaaatgtacctggaagattttaccatactggaaaaaagcagcttgacaaagactactgaagtcatgtcaaaaaaaacaaagaagtcaacttgaaggggctttctcttggcaaagatgggaaaatgtgaaccttgataaaaaataattgcatgcattattcacagtaaccaagatatgtaatccacctaggtgtctatggatggataaatatataaagaaaatgtgatatacacaatgaaatattattcagcctttaaaaagaaagaaatcctgccatttgtgacaacacagatgaacctggaggacattatgctaagtgaaataagccagacacaggcagacaaatactgaatgatctcacctatgtgtggaatcttaaaatgtcaaactcatggacacagagagtaggatggtggttaccaagggagttgagggaaatgaagaagtactagtcaaagggtacaaagtttccgttatgcagggtgaataagttcgggagcttactgcatagcacagtgactacagttaataatactgtgttgtatacttgaaatttgctaagagtagatcttaaatattgttaccacagaaaaaaatggtgactatgagaggtgatgaatatgttaattagcttgatagtggtaatcatgtcacaatgtatatgtctatcaaaacatcacattgtacgtcttaaatatgtacaattattatttgtcaattatacctcaataaagctggaaacataaaaataaaataactacaattaattgaaacatatcaaacatgtccaaaactgataaagaaaggtaaagaatttggcctggcacagcggctcacacctgcaatctcagcagtttgggatgccaaggcaggcggatcacctgaggtcaggagtttgagaccagcctggccaatatagcaaaaccccatctctactaaaaatacaaaaattagctaggcgtggtagcgggcatctgtagttccagctactactcaggaggctgagatagagaatcacttgaacccagaggtggaggttgcagtgagccgagatcacgccactatactccagcctgggtgacaaagtgagactctgtctcaaaaaaaaaaaaaaaagaaagaaagaaaagtgaagaatttatcctggcttttctgtaaaaactgcacctcagaagaaccaaattattgataaggaattttgctctttagaaatatttccagctaataaatgaaggaataatagcattgagacaaatcgccattttgtaatctcaggtgaatttacggatctaggcaatgatcattaatggctgagaaaatcacaacaaaaagaacaattagacatttgtgcctcctgatagaagtatacaatatcaccttcaaagctattttgccaaaaaagaaaaaaaaaatcaacccaaatctaatcaaggctcccactctaactcccaagctctaggatataccaaggacaaaggaagatcatgaaataccaccatggggattcaatcagcaaattctgaaatgcaacattatccttcaccctgcttggcctaaaagtacaaaataacacgaggaaaaattagtttccagagcctgttatattttgaaaaatcatcagaaaactgagaatcaaggatagaatttctagaaagttccttcccctaaagctttcacacttgcctcagtgtatatatgtggctataccactgacaggccgccagtcattaaattcaagctccaagagacaaactcttgaaaaaaaggcagcctaggagaaagcaacatgatttttcacatattttaacttggtttttctcataaaatggtttctgaatgtttcttagctttcaatgggcaataaataacttttagggaaatagatgtgagccaatctgaggaagtatttgagatgaagagaaggctttgctgtctatgaggagtgcattagaatagaatcgctccaggaaaaggtcacctgtgttgattgcctttatgaggtgacatttaaataaaagtactcgttcagttttcattgaaaaacattaaaagacatctccaaaaatttttttgggaatgtgagaaactctgctgcacaaatgatcatgttttgtcaaataagatgaaaagaaaaaaaacacacacaaaaatgaaaaaacagatggaggggtaacataaattaagaaactcagaagacacatctacaaattacaatttatggatcatatttgaatgctgattctaaaaatttgaaaaaatatgcatttgagaaaatgaatgctgacttcatagtttataatatgaagtcatattataaaatataataagaatgaaatattaataatttatcaggtatgataatggttttaaggatgtgttttttgtttgtttgttttttgagacagagtctcattctgttgcccaggctagactgcagtggcgcgatctcggctcactgcaacctctgcctcttgggttcaagcgattctcatgcctcagcctctcgagtagctgggattacaggcatgcaccaccatacctggctgatttttgtatttttttattagtagagatgggcttttgccatgttggccaggctggtctggaacttctggcctcagttgatccacctgcctcggcctcccaaagtgctaggattataggcatgagccaccacgcccagcctaagaatgtgttttttaactgtatatatttaaggtgtgcaacatgatgtgtgtatgtatatatatatatatatatatatatatatagagagagagagagagagagagagagagaaataatttctgtggtcatgcaaattaacatatccatcatctcacagctacaatttttgtgtatgtgtggcaagagcacctaaaatctactcttagcaaaaatcctgaatacaatacgatattattaactattgtacattagacctctagacttgtttctcttacatatctgcaactttgtgtcctttgacctacatttccccatttcctacccctccaccacaccccagtaataaccactttattctctatctctgcattcaactttgttttttctagtttttaaactctgcatataagtgagatcatgcagaatttctctttctgtgtctggtttatttcacttagtacaatgtcctccagattcactcacgttgccccatatggcagaatctccttcttttttaaggctgaaaaatattccattgtatatataccatagtttctttgcccatttatccttcaatgaatacttcagttgtttccacacctcggctattgtgaataatgctacaatgaacgtaggagtacagatattttatgaggtgatgatttcacttcctctaggtatatacccagaggaggaattgctgggtcctatggtagtgctatttttaatttatttaggaaccttcatactgttttccttaatggctccactaatctacattcccaccaaaagagtatacaggttccttaagggtgtatttttcaaaagggtcgccgagagatacctattaaaatatatacaagagaaatcttataatatcagggatttgcttcaaaggaggggaaatccaagaaggggaaagtaaattgggttatataagaaacaagattggccatgagttaatgttgaatttggatgatgaatacatgggggctcattatattattgcttgacttttacacacatttaaattgttcaatagtatgtattagtccattctcacactatataaagacatacctgaaattgggtactttataaaggaaagaggtttaattgtctcacagttctgcagggctgtagaggcctcaggaaacttacaatcatggtggaaggggaagcaaacacatccttcttcacatggtggcagcaagaaaaaatgcagcacaaaagggggaaaagccccttataaaaccatcagatcttgtgagaactcacacactatcacgagaacaggatggggaaaccactccgtgattcaattatctccacctggtccctcccacaaaacgtggggattatgggaactacaattcaagatgagatttcggtggtgacgcagcaaaatcatatcaagtaataagctgaaaataccctttatataaataatgataacactgcatggaaataaagaaaaatctttaggatgcagcctaactggtatttacgattttttaaaccctggattaaacgcatctttttataaatggaaataattaatgaagaactgagatggaatcaaaatagcaaatcatgcacacacacacacacacacaaattctgtttagagaactaaaacaatatgtcagaaacgttgaagagttcatgtgcatcagttagttcctgccatgtaacaaaccacaccaaaatttagtagcttaaagcaaaatcatttatgtatgtcataattctatgagttacaaattgaggctgggctcagctgagaggttcttctcttcacttttgggctcatgcatgtgaggattaatgggagctggcaggtctagggtggactccactggaatagtctgtctctgttccaaaaggttagctgaagcttgttttcctggcaacagagcagagttctgagagagcgtgagtatgcaaggcctcttgaggcccaagcctaggttcagaacaggaatcacttctgatatactctattggccaaagttagtcccaagtccagatccaggcttgctcaaaacagtggcccatctctctggccccaatctccatagttctggtaaacaaaaaaaaaagaaaaagaaaaagaaaaagaaagaaaggaaggaaggaaggaaggaaggaaggaaggaaggaaggaaggaaggaaggctgagataacattgggtttttccaatgataaaacctagaattaatgaagagctaaaattagtaaattttcaaaaatacaaaacacataaaatgtaaaactgctgaaaagataagaagaaatgaataaatctataattaagacggaaatctttaataggccataggcctcaggagtcctcaaagtaaacaaaaaatgcacaagcatgcttatcttaaaggattaaataggtatttttaaaatattgatttaatacacatgtagaactattaagtaacaaaatagatacatacaattttaaagcatagctaaaaaatggctaaaaattgattattataatacatgtgtatttcaaatattccaaaagaagtcagtccactcatataaactaaccacaatataacaacattagaacttccaaaaaaggtatgtgtatatgaggtggggttttttcaaccttctaaataattgtgggttaaaaaaacataaaaactacaagattttggaaatgaatcaaaatgagagttctacatataaaatcttcatgaaaatggttaaagtggaaattagatgaaagatttaaaggcatttactagaaaacaagaaattttacatttttaaattaaaagctaattaaactcaaagttaaatttagttaattaaactcaaaaagctaacagacctgaacttgctcagcagccttacctaagaatcatctattttaccgatcttttcaaagaaatgttttgtttttattgatcaatgcctccatatttttgaaatttttatagttttcatttattatattgacaaatttttttaaattattaatgtggcgctggcaatacacttgtgaagcatttagttatttatccttaaaatatattagtacttggcggagtgcagtggctcacgcctgtaatcccagcactttgggaggctgaggtgggcaggtcacaaggtcaagagatggagaccatcctggccaacatggcgaaaccccgcctctactaaaaatacaaaaaatagctgggcgtggtagtacacacctataatcccagctactcaggaggctgaagcaggagaatcacttgaacctgggaggcggaggttgtagtgagccaagattgggccactgcactccagcctggatgacagagcaagaccctgtctcaaaaaaaaaaaaaaattaatccatgtgcacaaagaggcataatcagaaataatcatttccaattttggctgggcgcagtggctcatgcctgtaatcccagcaatttgggaggctgaggcgggtgaatcacctgaggtcaggagttcgagaccagcctggccaacatggtgaaaccccgtctctacttaaaataccaaaactagcctggagtggtggtaggcacctgtaatcccagctactcggggggctaaggcaggagaattgcttgaacctgggaggtggaggttgcagtgagccgagatggtgctatcacactccagcctggggaacaagagtgagatgtcatctcaaaaaaaaaaaaatcatttttattttgtttttaaaaagaaaaaatgggccgggcgcggtggctcatgcctgtaatcccagcactttgggaggccaaggcgggtggattacctgaggtcaggagttcaagaccagcctggccaacatggtgaaaccacgcctctactaaaaatacaaaaattagccagaagtagtggcacgtgtctgtaatcccagctactcaggaggctgaagcaggagaatcgcttgaacctgggaagcagagtttccagtgagccgagattatgccattgcactccagcctgggtgacagagcaagactccatctcataaaaaaaaaaaaaggaaaaattggaaaaataaagtacatgcagtttatttgacagagggatgtttaactgaaccacactacatccatatatatgaagttatgcagcaatagaaaagaataatggacatttatatttttagatataaaaagagctgttgaacctatcattgaaattttaaaaggaagctgaagaacaagtacagtgtaataaattatttgttttttacaatttaattatagagtaaatgtgatctttcttggtatatagttctatagattttaataaatatttggattcatgtaaccaccaccacaaataggacacacaacagtttcatcaccctaagaaaagttcccggatgctcacccctctgtagccaaaccgtcaccccacccataatccctggcaaccactgatctattttccatcactataattttgccttttccaagaatgtgacataaatggaatcatgtagtatttaacgttttgagaccagcttctctcagcatgtgatatggtatgtacctgtgtctccacctaaatctcacgttgaattgtaatccccgatgttggaggtagagcctagtgagaggcgattggatcatggggacagatttctcatgaatggttcggtatcatccccttggtactgtcctaaggatagtgagtgagttctgcagagacctggtttaagcgtggagcacctccccactctcttgctcctgctctggctatgccatgtgcctgctcacccttaaccttccaccatgattgtaagtttcccgaagcctccccggaagccaagcagatgccagcatcatgcttcctatatagcctgctgaacagtgagacaactaaacctcttttttttttagcaaatgacccagtcccaggtatatctctataacaatgtgagaacgacctagtaacagcatgtctttgagattcatccaagtttctaccagtatcaataactcattcctttttactgctgagtatgattgtattctatggatgtggtacatctgtttatccattcattcattgaagggcatttgggttgttttcagcttttggctatcacaaataaagtttctaagatggccaggcatgatggctcacgtctctaaccccaacactttgggaggctgagatgggcgttgaggtcaagagtttgggaccagcctggccaacatggtgaaaccctgtctctactaaaaatacaaaaattagctaggtgtggtggcacacacctgtaatcccagctactcaggaggctgaggcaggagaatcacttgaacctgggaggtggaggttgcagtgagccaagattacaccactgcactccagcctaggcaatagagagagactctgtctcaaaaacaaataaataaataaataaagttgatatgagcagtttttacagatgtttgtgtgaccgtaagttttcgtttcactagggtaaataccaggttcaggattgctaggtcctgaggtacgtgtatgtttacctttcaaataaactgacaaaccattttctagagtgactgcaatttccagttgttctgcaacctcaccagcaattggtgttgtcagaaactttttattttcataattcttatcaatgtgcacaattgtttttaaaattcacagaattaaaggaaaatatattgtgcactatttgtgtaattaaagcaaaacacaaacacataaacggaagacaaaaataagaaactaattcaagaaactaaagaaagaaaaacaaaattaactttttaaaattagaataaaggcatatatatgtaatagggatagtttgaaacactcccaaacatctgctctgagccaacaacaatcggatagcgtgagggcagatacaaattaaatatgagacttaactctccccgttaaaaataaggaaagagacttacccaacacccctcccccccgcccttctctttctctgtctctttgaaatgtatgtaaatctttttaaaatgtaaataggcctctagccagttttacaacccaggaatatctttgtcaaatacctaggagccatctctttgaaatgtaagcatccagaaaggtagtgctcctatctctgaatttatatgagtgggtaggtctctaactttggcaagttccttgcttcaagttgcaaagccacttcctgtcacaaggatgtgagaattttgtttttcctttggttaaagccaaccagcgaacacagatggccactccaattatcaggtgaatctaggatgaactatgtgtatgtcaaatggtacttctaagttctcctatttgagaaccagttattgtttgtcttgagagcatatctgtaatgggttttatcttcttcaggatataaacaagtaggatttctttctgtctttgcaaactctttgtgaattgcctgtgatgtgtctcacattctggttcaatgcttattcaatggcaattgttttctttctcttctacctttgtggagaggttttctaggttgagagaagattttgtttttaattatatttcccccacaatagcaaacacatccccaaccacatacacacacacacacacacacacacacacacacacacacaacaggtaattagacaggcctgagcagggcaggagagggctcttcccccacccactacgaatgtcagtgatggttccaaaattatcacattgcctctctaaaagtgataaattgggcagcgcagtggctcatgcctgtaatcccagcactttgggaggctgaggtggacagatcacttgaggtctggagttcaaaaccagcctggccaacatggtgaaaccccatctctactaaaaatacaaaaaatagctgagcatggtagtggacacctgtaatcccagctactcaggaggctgaggcaggagaatcgcttgaacccagaaggttcaggtttcagcgagccaacattgccccactgcactccagcctgggcaacagagtgagactccatctcaaaataaataaataaataaaataagtgagaacatatggtacttatctttctgtgtctgacttgcttcacttaagataatggcctccagttatatccatgttgctgcaaaagacatgatttttgtggagggattgtattccattgtatatatagaccataatttctttatccaatcatctgttgatggacactcagttgattccatacctttgccatcatgaatcatgttgtaataaacatacaagtgcaggtatcttttgatgtgattatttcttttcctttgggtagatacctagtagtgggattgctggatcaaaatggcaggtgcctgtaatcccagctactccagagactgaggcaggggaatcgcttgaaactgggaggtggaggtttcagtgagccaagatcatcccactgcactccagcctgggtgacagagcaagactctgtctcaagaaaaaaaaaaaaatgctgtgtgattacccttatatgggtttcctggatgagccatttgttaaattaatttttgttggaaatttccccgcagagctgttgcacattgtggggggttaatccccagacactcccatgaggccccagtcacccaggggtgcctttggctgggaggagcaagtgccctttctcctaggagctgaaaaactcagtctcttatttatctatgaaaacaacagttcagtttctcacataaatgtgtacagataaaccgaatttagacagattttaggagaaaaagcaattgagaattccttttagaatgcatctcccaactagaattaggatccttaaacaaccacttcttaggagaaaaccagctcagaataaatcaaggaccatcaaccaaagggaggtctggggctcaggaggacttaccagttccaccagaggagaagctcgaagcttcaatgggcccctgctggcaccttagctctggttttgggcaactcctttagggtcctgagtcttccctgaggcctcacgtgtttgggcaccaaattattgttgacgaaaagagccaaactctgtaaaatattttaagagatttattctgagccaaatatgagtgaccatggcccgtgacacagccctcaggaagtcctgagaacatgtgcccaaggtggtcggggtgcagcttggttttgtgtattttaggaaggcatgaaacatcaatcaaatacatttaagaaacacactggttacttggaagtccccgcggggctgggggcgggtatcaatggaaaggaatgttcaggttaacataaaggattgtggagaccaagttttattgtgaaaagaaatctctcagatagcagacttcagagagagagcagattgtaaaatgtttcttatcagacctaaaagggtgcctggctcttagttgattatctcctggatctggaaaggaaggggaaaaagggggtgggtgggtgtgggggtatagaatgtggatctttttccaccaaagattttgtaaggcaatttcaaagtatggcaaggcaatatattttgtgataaaacattgtgattttttttttttttttgtgagacagagtctcactaggtcccccaggctggagtgcagtggcgccatctcagctcactgcaaccttcgcctcccgggttcacgccattcttctgcctcagcctcccgagtagctgggactacaggcgcccgccaccacgcccggctaactttttgtatttttactagagacagggttttactgtgttagccaggatggtctcgatctcctgacctcatggtccgcccgcctcagcctcccaaagtgctgggattacaggcgtgagccactgcacctggccaaaacattgtgattttcttccttgttatgccagagtcagattgaaaagtaagtcacaatatacagggtcaaataaaacccatcttgtaagaatttatggtttgtagggcataactccctagaccccttaggtaggaatttgggcaagataaaaaatcagagtttagtcctcaattccttaagataaatctctttctctatatatatctctctctatctcatatctccatcctattctctggaaaactctgactaatgcaagaaattaaagagacaaaacacataatacaatatcttaaacaacaaaatactattcagccataaaaaagaatgaaatcctgtcattcatggcaacatggatgagctagagcagtggtccccaacctttttggcaccaggcactggtatagtggaagacaatttttccatggtcggaagggggtgggaggatggttttgggaagaaactgttccatctcagaccatcaggcagtagttagattctcataaggagtgtgcaacctggatcccttgcatgcgcagttcataatagggtttgtgcttccatgagaatctaatgcttctgcacatctgacaggagatggagctccggggtaatgctcacctgccactcacctcttgctgtgctcccagttcctaacaggccatggtccccataccaatctatagcccaggggttggggacccctggcctagaggacattatgttaagtgaaataagtcaggcacagaaacataaatgctgcacattctcacttatatgtgggaactaaaaaagttgagcttacaggcccggctcggtggctcacacctgtaatcccaacattttgagaggccaaggcgggtggatcacctgaggccaggagtttgagaccagcctggccaacatggtgaaatcccatctctactaaaaatacaaaaattagccgggtgtggtggcgggtgcctgtaatcccagctgctcaggaggctgaggcaggagaatcgcttgaacctgggagacagagttgcagtgcaccaagattgcaccactgcactccagcctgggagacagggtgagactccatctcaaaaaaaaaaaaaaaagttgagctttcagaagtagagagtaaaataatgtagcaggtagaagaggatacggagaggttggttttaacaaatacaaaatcacagctagataggaggaataagttctagggttccatagctctgtagggtgactgtagccaacaatcacttattgcatattttcaaatagctagaagagaggattttgaatgttctcgcacaaagaaatgagaaatgtttgaggtaccctgatttgatcattacacattgtgtacacgtattgaaatatcactctgtatcccataaatatgtataattattatgtcaattaaaaataaaattttaatttaaaaatacattttaaaaatcaatacaatatctgacctgacactgcaatctcaactcaaggaggaaatgaatgctgtaaaaggcattattaggtcaattggcaaattggaatacagatatatatatatatatatatatatatatggatagatgatagactagataaaagtggtgtccatttaaatttatggagttagtaactatactgtcatacaggagaatatccctattcttaggaaatacacactgaattatttgggagtaaaaggccacgataatataaggccatgaacatataacttatgctcaatagattcaaagaagaaaatatacaaatatagagagactaatatagatatatatatatccatagatagagagaggtggggcaaatgctaaagcaagaaagataaaatgtcaacaataggcaaatctcaggggagctggggaaaaggtatcgtacaatttgtattttgcagccggtatgttttaaattatttttaaatgaaaagattttttaatgggttgaggaaattggagtgacttatatttatgacatccaatggactgtgcatgctgtatggaaacaaggagaaaataaatgtcatcattgcttaacaagtgaagggtaaaaagacaattaactcactgaagactacgcacagaaacacaaaagcctttgcttctgtggttataggtttaccaaaggcacaaagggatttgtatttattttaggattataatttacatcacttagttggaaaaattacagattttaagatatttttacaaatctgagtgactgtaaagactgctaaagtcttgggacatattcttaccaagtcccagatcttttgttttgttttgttttgtgcctgaaatcaaaccaggttttttagaccaggaaaacgtgagaagctagagctgctctactcagttggcccaaaccaggactccggagattattcccttatacagcaggcaccacattagagaaaggattctggaaaagtgagctggaacagaaaagaactgtctcaatgggaaacagactccaaaggacgctattggggggaggaaaacacaaaatatttcttgagaagaatgtggaaatggcaaagtctctagcctccagaaaccttaaactctagggaaagaaagcaaaaatttagaggtaagagtgttcatattaaaattcaaacaataagtagtttttctataaactctctttttttctaatcatgaaagtacacataatcattctctccaaactcagacattttagacagatagatagatagatgacagatagatagatagatagatagatagatagatagatagatagatacacatgcatacatactacatacatatatacctacatatgttggcacatagatgttcctttaccacagattaagttattctagatgcatatcttgtagcctacatttttatacattttcatcattttaataactgcatactgctctattatattctgtattttctatattagattagatccatgttttatcaccatttaggtagcttttggttttctgttactgtaatgttgagataaacgtctttatgtacttgttcaattattcccattaaacaaaagcccaaggtacaaagtttctgagtaaaaaaataggcacattttaaggcttctgatatatattgccaaattgtgctacaaaagaaaaactgtaccaattaacactcccagcaacaacgccaagagaatgctagtttccccacatctcaccaacactgtctagaacgcatagttttagagatgaacgctgggaaccgacgcactgtttgctctacctctccccctcctaacagtctagaacacaggcgctcaataaatcaatccaggctccagtccagtagacattctgatctaatctgactgctctgggtaacagaaaagtctcccttggttcactgcccagtatcctggcatcatgtggatcctataaaggcagtagctccaagcacattacagagggacccaactccattaaaccaccaccagctccccaagccaccccttcagccatgaagttcctgctcctggtcttggcagccctcggattcctgacccaggtgatcccaggtaaactggataaataggaggaaaggaaaactgggaacgaggaacactagcatatctggttgctctggtgatagatgagccaggttgggtggaggcagggctcaccccactgagttccagtctaaggtagagatctcctaacaaccaccactagccttgatatcccacacccaaacaccaccctatataacctttacaaaaatttgttttctattctaaaatgatagtcaccctcaacctaaaccaaaatatcttctttcactttatgtgagctccttatatctaacctcctaagacacactgaaggcttctgtcatcaccatgtgcatccattgagatcagcccgggttggagctcaaaggagattttgagcctagaaggaagagattgaggttcccatccctatgctcaacagacagctggcaggtgggggatggaagcagacctcttagagggctagttcccacaggatggtaagcaatgggttcagctcaaaccctggggctaggagataatgcagggtcagaaagagagagagacagacacacagagagcagggagagagagagatcagaggagggccaggcaacggatgtgaagaaagccaaagaggcttgagggtgctccgaagaggcccctgctgtgagccaatggcagacacagagcactgaggcaaacagatttcagcagatggtgaaatggtgcacagcactgggtgaatgcaaaaatgccctgtcactggcaaccgttattttctttttaatgattttggagaaagatttgactcctcccactttgccccaggttgactcatatttacagttttagagtctatgaaaacaagtaaggtagaaacaccttaaaagggagcctgtggggtgagtgagactagccccatttctcccttttgagtatccaagctcctccctgaccgtgaagaccaggctccccacccctgtttttacccatacatcctattctgtagtatcaaatttagcaaaaagcttcaaagatgcagatactggcaaagaagaagagctcgtcagacagagttccccaaggccatcaatccaggaagatttttgtctcctcatcactggctttcccaagtctcatttgcacaacatcctaaggatacacctcagaacaaaaagccaaacactcccatctggcgctgacgctttagtagccctgtgctgcttctaaccatgacttctctgtcttgtcctctcccatacagccagtgcaggtgggtcaaaatgtgtgagtaacaccccaggatactgcaggacatgttgccactggggggagacagcattgttcatgtgcaacgcttccagaaaatgctgcatcagctactccttcctgccgaagcctgacctaccacagctcatcggtaaccactggcaatcaaggagaagaaacacacaaaggaaagacaagaagcaacaaacgaccgtaacatcataataaccactgctatcgcctccaccaactcagagaaatatcatttccacagttccaattcctcctacattgctgagtactagccaaggctcctctttatggggcagatatctatagccaaccccaaaacttctgtcttctatcattctgtcattcatctagtaactaatttggagtttgtatctatcttacgagaacaatcatcatgcagattcgtccacaggggatctgtcagtttgggtcctccaaatgaaaaatgtcaagacagaattggacatgcaaaagattgactgggagaacacacctctgatggacaaaggtgagacagagcagccacaggcagggagagccttcagactgcaacgctggcctgatacgtgtcaaaggagagagggatagaggaggattgaatagaaggagactaagactgcagctctaagaaagtctcagccaaacagatggggaggcccaaagcaaggcttgcccctcagaggagctcacgcagggcaggaatagccaggttctcatatcccaggggttcagactttggctgagaacagcccctggagaacatggggtgactgctaccataggtctggaagtatgaggctgtccaccaactatccccttgaagcaagttctcttgaaaggaaatctaaacagtgcacccccatggctgccacggagtataaggagggagagaaaggagctgaaagtctaggtttggccagctaggtagactgacttgtgaggtatttatttattcatttgagtaacaaagcagacagaatacatagccaccattggtagtacaccccaaaagcaaggatggcatgatgctggtgactcaaacgtgcctactcatggtgtcaaattggcataatcctcttgggaagctgtgtggaaataagcacagagaagcagaactctaattgcttaatccactaaacattacttctgggaattggctcatcataaattatccaagagaagcacaaagttatgggcacaaaggttttccatataatattatttaaaatgctgagaaaatgaaaaaatctaaatggtgaaatatatactaatgccatctataaatacaaacaaatagaatgtttatagaataatggaacataataacattattcaaaattgcatttatgctatagttgtcaaaattgtctccttatatgatacaaaactcatgaaaattatgacttttttgtttggttggaaagcagaattatgcataaatttcctcttacagttcgatgcccattagttttatataacatttatttgacacgtactgacttctatctgagaagaacaaaccaaaacactcaggcctaaataattaaaaacggtcctaaaaactagcaaaccagataagaaaagatgttaatgcccattccctaacttatgtcttagaccaaaattaattctagatggttttaaaatgacagtgtaaaagtaaagtattaaaagattgtgtggtcaaatattcaatttaagagcaaggaaattcttataaatataacaatagaggcagaactcatgtaagaataaattgattaggtggtattaaatattaagttcttatgtatgtcaaaagatatcattttgaaattcatccatcttattgggtattgcaggagttcattcctttttgtttataaatactcttccgtcatatgaatagtattcatttgtatactggtttgttgatggacatttgggttgttcccagtttatggctattacaaataaagcttctatgaacatttatgtacaaatctttgtatggatgtatgctttcatttccctaaggtaaatacctaggagtagaacgtctgaatcatatggtaggtgaatgtttagcttttttgtttgtttgtttgtttgtttgtttgtttgtttgttttttgagatagagtttcgctcttgttgcccgggctggagtgcaatggtgcgatctcagctcactgcaacctccgcctcctgggttcaagcaattgtccttcctcggcctcctgagtagctgggattacaggcacgcaccaccccccgaccccggctaatttttgtatttttagtagagacggggtttctccatgttggtcaggctggcctcgaactcctgacctcaggtgatccgcccgccttggcctcccaaaatgctgagattacaggcatgagaatgtttagcttttaaaggaaatacaaaattgttttccaaaatggttgtgccagtggatgtgcccatcagcaggatgtgaaagttccagccgttcctcatcctcaccagcatgtgatatggtcagtcttttgcattttcatcattctaatagatgtgtagtggtatttcattatgctttcaatttgcatttttttaataactagttatcaaaaaagtatattctgtatgattctatttacataaagttctttaaattcttttaaaattgcatacaattatttaaaatagaaagtaagaatctaacgacagaaagcagatcactggttgtcaggggatgtgaaaggtgcatggagagggctgaaagaatgtaaagggacctgaggacactttgaggggtgatcagtcaagacacattcataggccgggcgcggtggctcatgcctgtaatcccagcactttgggaggccgaggcaggtggatcacgaggtcaggagatcaagaccatcctggctaacacggtgaaaccccgtctctactaaatatgcaaaaaattagccgggtgtggtggtgggcgcctgtattcctagctactcgggaggctgaggcaggagaatggcgtgaacccaggaggtggagcttgcagtgagccaagatcgcgccactgcactccagcctgggcgacagggcgagactgtctcaaaaaaaaaaaaaaaaaaagatacattcataatcttgattgaggtaatggcttaatgggggtgtacataagtcaaaaaattacaaaatggtaaactttaaatgtgttcagtttattgtatgtcaatttaaacttccaaaaaagctattattttaataaaataaataaatctcacagtgaaacagaaatattaaagtatcataaatagtttaaagacgtatgacaaactgagacatgtgatgaagtatcgataccaataaaatataacaagttaacatgaagcaacagggaaaacatgaaacccctagcagaaaatgaaaaagtaacatgaactagctttttaactctataaacggcctgaaaaatgggaaaaaatctgtgtgactgtgatcaaataaatgcagattaaaactacaatgagatcttgttttttacctatcggattgtcagagaattaacaaacccaagtctgacaaggcataaatagaaataagtctcatcatcagatgctccggtttataactaaatatgtccattctggaagacatttatctatacagctttcaaaacccttaaaaatgttcatgttctgtggctcagagactctacttttagggatatattctggggaaataattagagttcatatcaaaaagattaatgtatatacagcacaatcatagcagcatagtttaaagtagtgaagaggcagtggggtaagatggctgaacagaagcctccactgatcatcctccccactagaacaccaaatttgacaactatctacacaaaaaagcaccttcataagaataaaaaatgaggtgagtgatcacagtacctagctttaacttcatatcacctaaagaggcactgagaaggtaggaaagacagtcctgaattgctgacaccgcctctccccagtcctcaggcagcagctgtgtggtgtgcagagacaatatgtgtacttgcaggagggagagcacagtgattgtgggatttcacattggaactcagtgctgctagcaccaggcagaacccagcaggtgcctaaaagggatcatttagaccatccctagccagggggacatcacccatcccagaggtcggaactccagtttccgcaagcctcaccaccgtgggctaaagagctctggggtcctaaataaacttgaaaggccgtataggccacaagaactgcaattcctaggcaactgctagtgctgtgctgggctcagaggcagtagatttagggaccactcaacctagtgagacaccagctggggtgtgtgtgtgtgtgtgtgtgtgtgcgtgtgtgtgtgtgtgtgtgattctcgtgcctcagcctcccaagtagctggtgatggcagtggcagcccatctggagtggacgctgccatcaagccagctgcagcagggagggacagctggggctgcacattccacagagctgcagagctggggacaatgagagccccacaccttccaagctggtgcagcaggagctccccaggtgcaactgcagccactcaagtcacggctgtgaaccccggcctccctgtgttcttgtgggtgctgggagcaggcaggggtcctgcacttttgggtgcagctgcaggcgcccaaaccatggctgcggaaccagacatctctacactcttgagggtcagggaagtccccactgccctcacaagcttagaagtgcctgctcccacagcctggcgcctccctgctgtcggtgcccgctctaatcttggagcaaagttgaggccaagcccaggtgctgtcatagcctgttgggtgtgcacacgcttggggcagtgctgacataccagccccctgccgcctcggacccctacagacctcgggtgctgacgagcataggaggaaagccgaggtggggctgagggcagctcggcacctacagcctgggtgccatgaatggcagtaggagtcttctcagttctgtctccctcccttcagtgtggatgaaggggtagaaatgaggtacagcatcctgtctttcccaggggtcgtgttgcatcctttaatagtttaccactgacagcactaccaacgatttggggattgtgtctcgaggaagcaattgacctaaatttcatgtatcaatgaaactgtttttccttatggttttaattatttatttattttataaaataaaataaataggcttttaatatataatgaaagccttttaatgttaacatgcaaggactgaaagaatacctgttggactgcaagatggctgctccctctaccctcagcttcaactggcctgtcagccaagctttgatttcctaggcagaatataaaagaattcctctctgtggtggtccaggagaccaagggaatttggggaggtgatagaactgcaccctgatcatgctggtggtgaaaactcgtgcaaccgtacacccaaatgtcatcttttttactgtatgttaattttagaaatcagaaagtaaaagatgcaatcacaaaaatatcatttggtaggacaaacttattcagtatatgaagataatagagaacttttatacaaaagtggctcttacaaaatattaatataaaatattaaaatataaattctcaagagctataacttaaacttctatgttaatttaggtaagcaattctcctatgaaaagacttaacgaattctttccttttcttttcctcttgtcttttcattttgctgcaaggagcagccttaaagctgactgaaacagttattgtgaccagcatgtaatgcttgaaaagatgaaaatccagctttaaatatgctcaatctcaataacttttttggtttttttttttttttttttttttgagacggagtcttgccttgtcacccaggctggagtgcaatggcacgatctcggttcactgcaactttcgactcccagattcaaatgattctcctgcctcagcctcttgagtagctgggattacaggcaccggccaccatgcccagctattgtttgtatttttagtagagatggggtttcaccatgttggcaaggctggtctcgaactcctgacctcattatctgccgccttggcctcccaaagtactgggattacaggtgtgagccaccgcgcctggcctcaataactttttaataggtatatgcttagtttattcatgtttctttgctagttttttttccctgcaaagaagaagaagaaaaataattttaaatcttatttgaaggatgattgtacactgtgttattggccttggaaaggagagaaggaggaaaaggagtaggaaaagggaaaatatcttaagaggttgtactgttaatctacttccaggcagattttaaccactaaagctaaaatgctattatgaaattgaatatttcaattgaatattgaaaatggtataatgatgccgggtacggtggctcatgcctgtaatggtagcactttgggaggccaaggtgggtgcatcacttgaggtcaggagttcgagactagcctggccaacatggtgaaactctacctctactaaaaataccaaaaaaatagccggaaattgcttgaacctgagaggcagaggttgcaatgagctgagatcatgccactgcacttcagcctgggcaagagagcaagactccatcttaaataaataaataaataaatgaaaatggtatagtggcttgaagatgcaggggcccatgaggaagaacatggatggcccctagaagctgaaagcagcccccaggtggcagccagcaaggaagtggggtcttcaattctacacgtgcaaggaactgaattctatcaacaacctgaatgagcttggaagctgattcttccccagaagccgcagataagagctcagcctgctaggggcttgagaaaggggaaagtgactttaaaaatgtaactcgagggagttccaaaaggctaagcgattcggtgaatctaataaacatgttaaaatgcataaagttcgggtgtgggggaaagggaagggagagcattaggacaaataggttcttttctgagttctggccaggaggcttcttgatcagttcaaattgttacaaagttcagctggaggtttccttctccctgtggccgctctgggcctctggcagccctcctcaaggagcaatccgtttccttcagagggtctgtgggttctcctggcttccctaatgcgttcctgcagtccttctgaagcaaaacttaatgatgcgagcctccacacgctgctctgaccgtccgagtgggagctgcaatctagtcctgcctcccgtctgtcatgatccctggtggtttttgactacagctcaattgttttagattccatgtgtaagtgagaacatgaagtatttgtctttctgtgtttgactcatttcacctagcagaatgtgtaataaacattaacaaaatgaatgtgtaaaatcaggtagtgatcacagctacaaagaaaataaaacagagtgatagatggaaagtgatggggaggaagaacctggttagaaatggtggtcaggcaggacctctctaagaagggaaaagagctgtgactgcacgataagccggccacgtgaagaccttgaggacaacatgcaaagctgatgacccaccggccctgcaaagaccgggcgggagataagcttggctggcgcgaagaaagaaggctggagggagtagaaatggggacaggagctgaacgctgggagagggggctcaaagccagctcgcgtaggcagggactgggcactcgcaatgcgcgcagaacaaaggcctctctctctctttcgccacactaagggccaacatggtcatctccaggtgcggattctgccgtaaaatgcgcccctggcgactcacgaccaggacgcattccgcaccgctcccccacgccccgcagcccgccctcgaggctgattgatttgtgccagtctctaccgccatctgccggcagcactcggtacacccgcgccctggaggtcgcacgcgctggccaaacgggcgcaccagacacttttcagggccctgccaaagacctcccaatgtctactggcgtcccagacacaagagatccaggccaagactcacacttcacaagatacacagacacgggccttagggaacaggaaattccatgaaacttccatttacccaattagccggactcactgagccccagaatagggttttcaaccaactcctactaaaattaaaaagtaatgtgtggtatagattggaataatagacattggaggctacaaacgatgggaggcggagaggggtgagggttgaaaaattacctattgggtgcaacattcactatccgggtaatggggcactagaagcccactccaccactatgcaatatatgtatttgtaccccgtaaatctataaaaataaaaactacattaaaaataataataatgtctggtcatctaaatagtacctctacagcttattaagtgctctggagacgtcccagttgcctgtccttcccattaaaggtgatatccagtgctgatttccccttcaacctcgggttcccataaacctcttctttctcactcctgctgccctccggtactccaataaagaatgatagatgggccgggagcagtggctcacgcctgtaatcccagcactttgggaggccaaggcggatggatcacctgaggtcaggagttggagaccagcctggtcaacatggtgaaaccccgtttctactaaaatacaaaaattagctgggcatggtggcgggcctcagtaatcccagctactcaggaggctgaggcaggagaatcgcttgaacccgggggcagaagttgcagtgagcagagattgtgccactgcactccaacctgggcgacagagcaagactccgtctcaaaaaagaaaaaaagaaaagaaacagtcccagtatgcatccatgtgcatgtgcatgcaggtgtatctgcctgtgagagctgcgcacgcggctctgagtacctgggaagacacccatgtacagatgctgtacatgtgcggggtcactctctggcgcattcggaggcatgagggctacgtgcaatgcgagggaacctatgtccaggcttcctttcttggttttcctcctctgaactcatgcatcccttcacaaacagtccagctcctggctaaaaacctatgtgtgatttttcagcccaaacacaggcaatgacaggttttacctggcaggcctcacagctgagtcgtgcacagctgatgcgttgcagtctttaaagacagttgcagacacagactcaggcctcctggacagtcgacctctcacacacatctccgctcccaacccaagtcttcattcagacacgtcttcattgcagtggggtaggccttcggccaggacctccttatcttggggagtggagaatccttgaagacactttcctccatgctgactcagaagttttcccactctcccttccccaccccatccctggcccccaggtccgtacaacttcaggagcctttttgttggaagcttttctgcagtgagaccaaccccacacctgtgctcatccacccgaccccagttggcatcattctatgaggaaattagaacaggtggatctgtgttctacaaaataaaacaaaccaggttctctggtttagcctctttcttgtactgtaataataagagatttggggcttggctattacttgctttgactttttttgttttgagacagggtttcgctctgtcacccaggctggagtgcagtggtgcgatctcggctcactgcaacctccgcctcctgggctcaagcaatcctcccacctcagtctccctagtagctaggactacaggtgcacaccatcatgcccagctaatttttatattttttatagagatggggtttcaccatgttgtccagtctggtctcaaattcctgagatcaagcaacccactggcctcagcctcccaaagtgtgaggattacaggcctgagccaccatgccgggccatcattaatcagctactccagcacttagcagttcagctctctcctgctcagctgagctcctgattgtacagtggttaagagcaaactgcctctgccacttagtaacctggtgacttgaaaaatcactttgccttttcatcctttggtttcttcatctgtaaaatgaaaataacaataaacaatacctacttcacagggtggttgttgtgagggtgtagtgagttgatgtatgtaaagcataacgtaggttccattgaagtgtttgctattgtgttcaacagggtccatttctgcttggagatccacatggctctggggagtacctgttggctcagcctaggtcacgtgttccaccttaaccatcccttccctgctccaaggtagagcccgtgacctgaactaaaccagcaggcacgctccacctccaacaccggctcaaggtgggcgtgtaatataagctggttcaattagaatgaatcttttttttttttttttaaagacggagtctcatcccccatcacccagactggagagcagtggcacaatctcagctcactgcaacctctgcctcccaggttcaagcaattatcctgcttcagcctcctgagtagctgggattacaggtgcctgctgccacgcccagctcatttttgtatttttagtagacacagggtgttgccatgttggccaggatggtctcgaactcctgacctcaagtgatccacccacctcggcctcccaaagtgctaggattacaggcgtgaaccactgtgcccagcccaattacagtgaatcttaatacactggctgaaaattctgggacacagccagtctctctctttccaacaggacatgtacaaggacctgtacaaccctgggagatgctggcatattggggccacaagcagtgctgacctgaagaaaagggcaacacctcagaaaacaaagtagataaatagaaaccaagtccttggtgccatcacttgatttctggacaaagcctcacctaagctatttattgacctgagcccttcatagtttaggccaatgtgatttggttgttttgttacctgtaaccaagtatcttaacacaaagtggatctgtgagtgaccagagcctcttgggggttgtagcaatctagtagttggcccagaaaggccaactctgagatggagtgtagggtgcagaatgttgagtaatgagtgctcttggaatcaacaactgaggaagacagaaatatgcaggattgggcacagggagaagttcagctgcagtgcaggcccaagggtagttgcagctgagccttcaggaagttctggagccagagtagcccttctgagttgttccaagcactgaaggcctagcaagttccaggggtattaaaatcaataagcctgtcagccccgacaatgccctcaataggtctgggcacagattggagagaagctgggctcccactgcaccaggagggagtggcccagagccactgagccatggagactcaggcagggggttgctccagcacttcttctggagaagttttgagccccagatgcagttagcacagttgcccgccccttatcataagacgaagtccgttcccaccacatcttctgcaagacctagctggggaccccgagacactggcaaaaaagcaaatgtaaatccagctttattggtaaaaaaggaatagcagatttaatcagaaattcccacctggcccagcagcaccaaccagaaagaagggaagaagagaggaaaaaaccacaggaagaaagaaaggagggagggagggagaggaggaaggaaggaggagggaagggaaggggggaagaagggagggagggagggagggaaagaaagagggaggaagggcagagggagcagggagactgtagatcagggtctgaatggagatccggtcctggaagtaaatgatccaaggctccaggtgctgggaagagagcaggaggggagggcggcccatggcactgccatctagaagggtagtggctcttccacaggaatgttgaggatgacatccatgtctggggtgcacctggtgggaggcagcacagaaggccatgagagaccagaggtggcggtgtgggagcacccactcagaggagccctgctctttagaactctggtacgtacttgggttggggggcaatcccaaaatacaatctgtgatctatctgtgacctcaaagcccaactgtgcatacacaagcatacacacacacacacacacacacacacacacacacacatacacacacatcaaaaatggaaaagaaatgagtttggcaggacaaatgttcccctgacaagtctgaggtcaagagggagcaggaactcagctctgaaatgctgagggccctcaagatgatcactggctttggagtgaggatgacaggtttgataactttgacctgtgtcaccttgagcaagctatttctactctcccagcctcactccttcagttggcacttaagtgaaaagcactcattaagtcccagaccccaagtgagcctcagtttcctcatctgtcaaatgggtttaatattctaacctcagtcattggtggaaagattaaatgagaccatgccagcaggtaataagtgctcagtaaatgacaggcattattatttccatgaaagtagcaagagagatggattcccatcagcaatatattccccattgcagggaccagcacaaatatttaagaggctgaaggattacattctgtttcactctcttttctctcttccaaggagaccatcctctctcatggtttcaataatctgctgatacacatgaagtatttaggcaggaaatgtcaggatacttgcaatttacaaatactattaaaaaaatgaacatgaaaccaacatagaaaaaaaaaaaatttctaaatctagatgggcaaaactggctattcattatatcattctctcttctttatatttgaaatttttcataataatagtaaaaaaaaaaagttcatctctatgctggcaacacctaaatttctacttccagccaatatctgtcctctgaggtctacactcatcttgtcaattgcccacccaatgactccaccttggcacctcatataaatcaaacttactgtccaagtcaactgtatggtttttgttttgttttgttttgtttgagacatggtctcactcggtcacccaggctggaatgcagtggtgcaatcacagctcactgcagcctggaactcctcaatcgatcctcctgcctcccaaatagctgggaccacaggcacgtgccaccacatctggctaattttttaattttttgtagagatggaggtctcactatgttgtccccctggtctcgaactcccagcctcaagcgatccttcttcctcatcctcctaaagcactgggattacaggtgtgagccaccatgcctgcctccaaataaactttttgactgtgcctacatacacatccctcaccccgccccagccttcccaatctctgcatttgacatcaccaccaccccattataaaagtcaggaacccaggggttattcttgatacctccctttcctgtacttcccaagtcatgcaagtccttcttactttcctaaatatttctccaatctatctatttctcccatttcttctgccacactcttggccaggccacttcccatgttcccctggacaactgccctcacacccactagaattccagctgccattctggctccttgccaatctcatccccatgctcttttcttttcttttaagaaagagtcttgctctattaagcaggctggaaggcagtagcaccatcttggctcactacaacctctgtctctagggctcaagcaatcctcctgccttagccttcactgcagctgggactacaggcgcacgccaccacgcctggctaacttttgtattttttgtagagatggggtttcaccatgttgcccaagctggtcttgaactcctgggctcaagcaatcctcccaccttggcctcccaaaacgctgagattacaggcatgagccaccacacccagcccaccatgctcttttcaaactgacttttttggaatacaaatctgatcatgtggcttaagatcctttgcttctgggatcaggcagaacatctgggcctacagggcactgcatggaggtccctaggggctgagttgccctgctcccttcccgccactctccctgtcactctgcattccaaccactctggcctcactcagctccgtgtcaatgccaagttccttccaaccatagctccttcacagctcaaggctcaacatgtggttggttcatagagcagtaacataagcatcaccgggtagcttcttagaaatgcagaatcaggctgggcatggtggttcacacctgtaatcccagcactttgggaggccaaggcaggcagatcacttgaggtcaggagtttgagaccagcctggccaacatggcaaaaccccgtttctactaaaaaacataaaaattagccaggcatggtggtgcacacctgtaatcccagctactcgggaggctgagacaagagaatcacttgaacccaggaggcggaggttgcagtgagctgagatggtgccagtgcactccagcctgggagacagagctagactctgtctcaagaagaaggaaggaagaaaggaaggaagggagggagggagggagggagggagggagggaggggaaagaaagaaagaaggaagaaagaaaaagaaagaaaagagaaagacagagagagaaagaaagaaagaaaaagaaaagagagaaaggaaggaatgaaggaaggaaagaaagaaaagaaaagaaaaaagaaatgtagattcatgagccccactgagacctactgacttggaatctgctttttaacgcgatctccaggtgtttcctgggcatgttccagttggagaggctctgcttaacagtgtgccatttctactttttaggagggaaaatgtgcttccttgctcctggtgttcccttccacgtggaagggcatccatgagtgtattgctcctggcctctctctgcccccttaaattctgcttttggaaagggggtatgaccaccagaatggtgagtgtgaggagaggaaggggacacagggagcccagtccctttctctctcagcagcaagaaacccgaaaggactccactcttctctgccccaaggcctggctccacgtgggtccagctccaccatgatcgggtggttcaatttgcctaattctgggttcactattcagaggccaacacagtctctaaaatcagctttaccagaataaaggtgataacctggcccacatgcaccttacccctttcagtctcattcactgtgttcagagttcaggtaaagacaagtgactatttattacgtcccccggagaccctggcaccaccgcctagaattgctcttccttcagctcccccatcagtctctttcacctagtgaatttctatgcatccttcaagcctcagttcaaatgtcacatcctcaggaaaaccttccttgactgcccagacttgctgtcctaacagttgctttcttttttcttttttttttaattaaaaaaaaatttttttttagatggagtctcgctctgtcacccagactggaatgcagtggcacaatctcggctgaccgcaacctccgccttccaggttcaagcaattctctgcctcagcctcccgagtagctgggattacaggcacccgccaccatgcccagctagtttttgtatttttagtagagacagggtttcatcatcttggccaggctggtcttgaactcctgacctcgtgatccaccggccttggcctcccaaattgctgggattacaggcgtgagccactgcacccagctcctaagagtcacttttgcagtggcatgtactctactcagcagctctgggctctgctgcaactccacatttatttgtggctcattatcgactcatgtccagttccctctttagttccatgagggcgggaccaaggactgttctcattcacatggtgcctggcattcagaggcacttcataaatccaatagtattttgttttgggggcggggggcggtttagaaatagaagaaaaggaagaaatggcgataggagaggagaaggaaggaaaacgacaggagggagagacagatgaagaagaaaaattaaagaatttgcaaatgctaggctctgccacacatggtcctgtggtgtcatcaaggagaggtaagcctgggggacccccaacccaaccgcagagggcttgccccaaggaagggcaggcaaagaattggtttctggggcccagaaacctgccaagtgaacaggacagacttctctccttgtagagtgtcttccaggctattcttccctgaagccaaccaccccactcaactctgccttcctcaaaaacccagaagtggaaggctgtacccacttggttgacacatgggatctgggaactagaagggcccttagagattacaccacccagcctgctgtgtacagatgggaattggaggcctttgcagagatgggaaaggtcacatctgcccctggtcagtggcagatccaaggtggaaacccaggaccgcccctccctccctgtacagggttctgccatccacaccaggctgccttccccaagaacagagagcctccgtgagctcagagtgtgactggtttaagaggcagtggcaaaaagatcacatacttgggtctccgaagcagaacatcctcaaatatgacctctcggggttcccgggtctgggcttggagctcttccacctcggcccttaatacaggcatgttctcctcaaactggtcaataatctgagaggaaaggcacagcaggggagaagggagaggcaaatggcccccaaccaaagggagaaaggccaaaatgaacgaggagcaaagctatctggggaaatggtatgggttctgtcactgggacttgctggactccagggaggggacttccccatgcaaggtgcggctggcttccaagttagtgacaatattcagtggtgctgaaacaggtgagggatcatggagaatggagacaggttacaaagtggcggggaatgctcaatcatgggaatgaatggaggctggcagagatagtgaagggcatacacattaaaaaccagtgaagaggcaagataatgaaaattaattcaagaaggcagtgatggtgaagttcattaacactgataatgggtggtgggcagtaacaagaatcaaggggtaaagatgcacggtggttaatggctgaataggtgatgtttggtgatggttgtaaatgggtcattagccagcattgctggctaatgaggcaaggcctaggtcagtgccaatcgccttcccagatgaaagacaagtgacagtaatggcaccggcaaggagggaggccaacaccagagtcagagacctcctgagcgccagatcaggagaagcctgactcattcccacaggccgtggggactgcccatccactgcttccctacagggaccaccaccttccttgcccacgcacttctctgaacctttgcatgcatttcaggaagtcctggctttcccacatcttctgtaggagagcctcttcatagggacgctgggtttcctgtggaggaagaagaggtctggcccccaggtgcctcttcctgggcagcagaacatggtagagaccgatggggctgcagtgggcctggaggcagaggatggggaagagggcggggtgggggtgagacctggatccccgctcccacacagcaactggctactcaccgccaccacagaactcagaatttttttcttcttcttctgaatcttgtcagacaaggattccaggacctttctgcgcatctcaccgaggtcatccagctcatcctgggagccagcagaagggtgttggtcaccagtcctgcctcccacacagtctggtgggagaggggcaggggctcccctacctgctggctgtccttaacctgctgcagctggcgcataagagtggagatctggacagacttgatggaatactcatggtccatgtaagtgctcaggaagttcacttcctcctgggtcttctcaatcttggcattcagctgctctgcctgctgctcaagatctggggaggggttagggaggtcagcagggacaggaggcaagaccttccctcaagcacctgggccccaggaggcccaggaggcaaggtctccttggccagtaactggggtctgggctgaggtgagctcacacagggctgggaggtggttaaaagttaaggctctagacggttttccacccctgcaggagaagaggcaatgctgggtaggaaaaaggaagggaattggtgcatgatccctagactagtccccactctgccactgacttgccgggtggctctcgccaagactgtccctctccagacttcagtctcctcagagacacactcaaggaagtgagaccaggcagatggggtgacagtggctcccaagacacaacccatggcaggattaagacaaagtctatcctgtcttcctccagagagacccccaatgtctggggttgactgatccaccacccctctgctcagcaggtgtgtagtctgctcagggaaaaggaaccacaggccaggcaggatggaagccaggagacccaggttctagcccagccactgactcccagaaggaccttggcaggaaacagagccaggctaggattggattctggctcctagctatataaccttccacaagctactgcacctctcttagcctcggtttcctcatctgtaaaatgggaggacagcttccctgcctccaagtagttgcaatgactgagtgtgtgcctgtaacaatgcagacattggtagagacccagatacggggcctggaaagagctaagtgttgggtaactatgctattcgctctgtatcttagcattcccatctgccaagaagagagccaatggggctgagggtttctgaatggcaagtacaaggtgaatgctctgctgctgacctccccaaggtgccaggggggagggtcaaggaatttgccagggattcttacagctcatcttgcatttcttcttttcttcccactcctgaagctcagatttcaattgctgcagcctcttcttgtttgagtactccaagatgtcgatgatggtctgcgggaggggtggagtcaactcacccacaggctctgctggctctcagaggcggccacccagcacttcctcagaggagtccccagtcccaacctcactcccagaaacctgaccagaggctaatcgggacagtaacagtgtccacccatagggttgttgtaaggactatataaagacatacagatcgcttgctattacacgtagaggtgtttgcaaatgctgttggtggtagcagcgacctctgtcgcaccggtacagtatgtgcccggtgaaccccctctgggacgggtgctatggtgccgcatttcacagagctcggggaggcaaagttaactaaaagtctcccggccagtgagtgctggcgcgctgggatgaaacccatctcggtcctcttgcaaagcccaggtgaggggagtgaagggtgaagaaatgcgtcttccaggtggaggaagcaccacgtgcagtgggcggggaaaggcaggagagggcgcgcgagtgcgcggagggagggcgggacggagggagggagggcgggacggagggagggagggagggacggagggcgggacggcgggagggcgggacggagggacggagggagggcgggacggagggcgggagggcgggacggagggagggagggagggagggacggagggcgggacggagggacggagggagggagggagggacggaggttgggacggagggacggagggcgggcggatgccgcgggtctcaccgccagggtgtcctgctgctgcagcagggcccgcacgtgcagggtcgtgctgttctccatctcctggatggtctcgatcagctcccggttgagcttgctgaggaagttctcacggcttcggagctctcgcagagcggccctcccgctcctgagcgaggtctgcgggcggagggaagagcagagaggcggcgctgcgccctgcccggcctgagcccccgaaagcccgtggacccgccgccccggccccgccagacgcccgcccccgtgcggcctcctgctggtaaacgcggcccaagctgggcggttccccattgtctgcgccgcccgggagctccgggactctcatccgttcggaaacgcacgtgtacccatcatctcacatccctgaggtgcgggtgcatctacagttggtggcgtgtcaccaactaatcaacaaatatattattagtgggtaaataaagatgtgccttcatatcaatggcttctcagaatcaatgaaatatagaaataatagtaagggccgggcggggtggctcacgtctataatcccagcactttgggaggccaaggtgggccgatcacgaggtcaagagttcgagaccagcctgaccaacatggtgaaaccccgtctccactaaaaatacaaaaattagccgagcgtggtggcgcgtgcctgtaatgccagctactggggaggctgaggcaggagaatcgcttgaacctgggaggcggaggttgcagtgagcgagatggcgccactgctctccagcctgggcgacagaggaagattcctgtcccaataataataataataataaacgccccaggtaggttaagaaggtggcagagcgaccgccatgtctggaggagaagcaggggaggcaaaatggatgataaacgtcagcatttccgggcaggccgcggagtcaatgagtactctcatttcacacaacagcccccagtggaacaaggagggtctgagggttaagtgactcgcctaaggttacacccagcaggtgcataaaacctacagtaacaacaacaacaacaattgtacttccctaaggttacacccagcaggtgcataaaacctacagtaacaataacaacaacaattgtactcccctaaggttacacccagcaggtgcataaaacctacagtaacaataacaacaacaattgtactcccctaaggttacacccagcaggtgcataaaacctacagtaacaataacaacaacaattgctgagggccctctacatgccaggccaggtgctgtgccttgctctgcaggtggcacatggtatctgttcaccctccaacagctttatgtttactaactctattttgctgataaatggaggctcagagagtttaatgacttgcccagtgtcacacagtcaagaagtggcagggctggaactggaaagccagacttctgaatcccaatgtctgtctttccgttatgctaaaacaagaactgagtagccttaaaactgcaaggcatggctgaaccacgtagtgactaagacttggatgttgaacctagacacaccttggttcaaatcccagctcagccacttaccatctaagagaatctgggcaagttagttaatgtctcagagcctccttatactcattctaaaggtaaggaaactagtatctgttttagagaactgccgtaaaatataaatgagattggacaggtgcggtgactcacgcctgtaatcccaacactttgcgaggcccagatgggaggatcactcaaggccaggagttcaagaccagcctgggcaacatagtgagacctcatttctacaaaaagtaaacaaaattcgctgggtgtggtggtgtacacctacagtcctagctactcaggagtctgaggtgggaggaatgtttgagcccagaagatcgaggctgcagtaagtcaagattatgccaccacactccagcccgggtaacacagcaagaacttgtctctaaaagtaaataaataaataaataaatacaattttaaaaaattaaaatgttcgctgggcatggtggtgtgcacctatagtcctagctacttgggaggctgaggcaggaggatctcttgagcccaggagtttacggctgcagtgagctatgattatgccatttcactttagcctgggtgacagagcaagaccctgtctttaaattcacaatcaagccacttagtgagagtgcactcatgtgcactcagtgaacaatagctgatactactgtctctggctctaaccctctacccctgccataaatatttgctctttcatttgttcctgtacttcctcatttctccgtcctttactaaaaacgaccccttcctagccctcagctcctttatttctcatataacagtaatcatgctgatgtgctgagtgcttgccatgtggctgatactgtactaagcacttcatgcgcactgcagcacatcaccctcacagcaagactaagagatgggcactattattaggccaactttataaaagtggacagcagtcgggcacagtggttcacacctgtaatcccagcactttggaagagcaaggtggaaggactacttgagcccaggagttagagccctgggcaacaaagggagatcccatctctacgaaaattagctgggcatgatagtgcatgtctatagtcccaactactccgagaggctgaggtgggaggatcacctgggctcggaaggtccaggctgcagtgagccatgatcatgccactgcgctccagcctggatgacacagcgagaccctgtctcaatcagtcaatgtggacagcaaggattaaattcagtaacttattcaaggtcacacatagcagagctgtcatccttgaagtcttgcctcctagccactccactaccttgtctccacatctccagaccaaaatacccagaagtatcttgtgaaaaatgttattctccaagtcctgggcccactgaaacagcagcactagggtttcagttcaaatgtcacccaccttagcagcctctcgttagcacctaaacaattactgccacactctcctccgtgcctccagccccctaaccttattcttaggcttctctttagctcttatcatcatttcaaatatctttctcttgttgattgtcagtctcccccatccaatagaatggaagtcccctaagatcagaggtcacattactggtgaaccctcatactcagaatagaacctggcacatggtaggtgctcaatcaatatttgttgattcattaaatgaatgaaagattgcaagagacagtattaagaactggactggttaggagcacaagttttagagccaaattgtccacgttcagcttctacatcaatcaaaaacacctaaacccctctaaagttaggataaaaataacagaaatggctggaagcggtggctcacacctataatcccagcactttgggaggccaaggcgggcagatcacctaaggtcaggagttggagaccagcctggccaatatggtgaaaccccatctctactaacaatacaaaaaattagctgggcgtggtggtgggcgcctgtaatcccaggtactcaggaggctgaggcaggagactcactcaaacctgggaggtggaggttgcagtgacctgagatcttgccactgcactccagcctgggtgacggagtgaaactctgtctcaaaaaaaaatttttttaaaaactaagagaaatatgagttcctcctttaagaatactgggctacctctaaaccattttgcaagataaaaggttaaaggggaaaaaaaggtttcaaagcaaattatattttcccttgttctttatatagtagtcattgttcattgagctattaaaaattttcttgaagaattattctatagtattttgtagtctttataatacttagtattttactttctgctatgtatgctaaggacttgtcttcctttaggcatttcaaatactttgagacattgttcagataattacagaagccataaaacaatgtatagcgaggaaattaattacctacaattgtagcgattgatgtgaaaattttcattgtcagtttctaaggcttgcttcaaagtacactgtaagaaaatttaatttactggaattttttttttttgagatgaagtctcactctgtctcccaggctggagtgcagtggcaccatctcagctcactgcaacctctgcctcccaggttcaagccggtctcctgcctcagcctcccgagtagctgggactacaggtgcgtgctaccacacccagctaatttttgtagtttgagtagaaacggggtttcaccacgttggccaggctggtctcgaactcctgacgtcaaatgatccacccacctagacctcccaaagtgctgggattataggcatgagccaccacacccggccaagttgctgcaaattttaagataaataagccactagatcgtgttcctaatgcaacaaaataacaagcaattctgattatttcttgagtcttaaacagaacagcaaacgctttgtttaactggctttgacccctgatcctgccatttcctggctgtgtgacctggtgcatgtcatttatctccctgcgcctcagtttcccggtttgtaaaataggaacaaggataagcgtgctcacacagttcctgtgaggaagaaatgagtcaagtctggcacccacaaagttctcagcacatgtttgctacagccatcatccccgtccctgtcctgggcccagtgtccagggaagatgtgcctcataccttcattaaccagattttggcatgcatcttcccagggtccaacttccgccttctatgtagttctcttggattcttcggctggcagcttgtcaccaccgtagtgggcttgaagtgaaacactaggggtagacaggaaaggacagggagagagtgagggtcccggaaggcctgaggccaggttcccgggagtgcaccattaatgagaggagggccagaccccagctccaccctctgactgccttataatgtgacactagaccgagggtgaaattcacacccttcactaagctcccaggacagactctgggcctcaatatgagggagggacaagcccaggtgaaagcagtaactatggacatggacagaggggagggcagggcagccaggaaccccgctctcaaatgtccagtcagaaagagagtcgggaactcccactccttgtgtctttccagtagctactgcagcacaggacagcagaaagaccagagtctggcaggcctgaatccaaatccctgctgtcccaccaacctggctggcagaaggcctgatggggtaggggttaagagcaagaactaatgagccagacagtccaagtttaaatccaggctcttggccaggcatggcggctcacgcctgtaatctcaacactttgggaggccaaggcgggcggatcacctgtggtcaacagttcaagatcagcctggccaacatggtgaaaccctgtctctattaaaaatacaaaaaatgagatggacatgatgatgggcgcctgtaatcccagctacttgggaggctgaggcaagagaatcgtttgaactcgggaggcggaggttgcagtggtgcgagatcccgccactgcactccagcctgggtgacagagactctatctcaaaaaatatatataatcataaaaataaatttttaaaaattccaggttctgccttctactagctgcgtgaccttgagcaagtcaaatgacctctgtgtccctccattcgtccacctataaaatgggaataatcatcacgcccacctcatagagtcttcctgaagatgaaagaagttactataccttaaaggtgtttggaatagtgcctgatgcatattcagtgctggatacacattaccagttgttactcttacttctagtgacctgagaagtgggaccacaacaccagacgaaggcacagcagccacgcaaaactccaactggctgtctctgaaacactctaagggctgtggttctgccagataagagtacaggcatttggggggcatattctcagaatccctgtttcctctctgcctgtcgtgcaatgacatgggacaaatcgcccaggtggatccagctgtactctcagtcctcaccaaaatccctgcttcaggtacaacccagctcatctgggagagatactaatctctttaatagatcaatgtccttcatcctgagaaatgctggcattaactatggagatgattaagtaaattaattttgtgtttaatttataaattacctgtatatatccggtttttagttgtattgtataagagatagaatgattaataggttaatcttgtgattctaattttaaaagtgtaagtgggattttgatttagatttaagttgaaaggtttaatacactcttattagctccgttgcccaggctggtgttcaatggcgagatctcggctcactgctacttctgcctcccagattcaagcaattctcctgcctcagcctcctgaatagctgggataacaggtgcccgccaccacacccagctaattttttaatttttagtagagatgcggttttgccatgttggccaggctggtcctgacctcaggggatccacctgcctcagcctcccaaagtgctgggattacaggtgtgagccaccgcgcccggccagattacccatatttagaagtttaagtattagatatacaagaattatgtaaatacccaatggtttttgttaatcagacaagtgaaccatttgaaaatgaaaatgaatacgttaaaatttaagatgtggcttaaaaggtttaggagaatttaattaaccaagttccaaaacccccttacaagtgtttataaaaattgtaagattcttaagttgaatttaaatgcttaaggaagatttgcagttttaataatgaggatttattttcattattggtagtagccctaatttatctttttttaaattaaatcttttattacaagatagttcagattcacaagcagttttaagaaataatacggaggggctggccgtggtggctcacgcctgtaatcccagcactttgggaggctgaggcatgtggatcacctgaggttaggagttcaagatcagcctggcgaacatggtgaaaccccatctctactaaaaatacaaaatttagccaggtgtggtggtgcacgcctgtaatcccagctacttgggaggctgaggcaggggaatcgcttgaacccgggagttggaggttacagtgagctgagatcacaccactgtactccagcctgggtaagagagacagagagagagagagactctgtctgaaaaaaaggaaaggaaaggagaggagaggagaggggaggggaagggaggggagaggaaaaggaaaagaaaaagaaaaagaaaaagaaaggaaagaaaaggaaacagaggtagtctatgtaccctttacccagtttctcccagtggcaacatcctgcaaaagtacggtacaatatcacaaccaggatattgacattaagatgagcaagatataggactttcccataaccacaaggatcctgcctgtcgccttctacaaccacacccacttccctccccttaccaccctcctcacaactctgtccctaacccctgcaatcactaatctgctctccatttctataattttgtgatccccagaaggttatataaatggaatcatccagtatgtaactgtggggattggcttttttttacttggcataattctctggagattcatccaagttgttgaatatatcaatagttctttcctgtttatcgctgtatagttttccacggtggggatacaccataggttgtttaaacattcacccactgagggacttcaaggttgtttccagttttgaggaattatgaacgaggctgctatgaacattcacatactggcttttgtgtgaatataagttttcatttctctggaataaatgcccaagagtaaaactgctgggtcggattactaggaagtgcatgtttcatgttgttagaaatggccacacttgtttccagagaggctgcatcattttaccttcccaccagcaattgcgcacaatctgacgtctcctctttgctagcatttggtgttatcactatttttttattttagccatttcgataggtgtgcagtgatatctcactgtggcttaatttgcattgccccaatggctaatgatgttgaacatctttttaatgtgcttatctgacatctgtatatctgctttggtgaaatgtctcttcatgtctttttcccattgcctaactgaattgtctgtttcactgttgagtttttactgttactgatatattctacatagtagtcctttgtcagatacatggtttgcaaatattttctccaagtctatagcttgtcttttcatcctcctaaaaaggtctttcataaggccaggtgcagtggctctcacctataatcccagcactttgggaggctgaggcgggcagattacttgaggtcacaagttcgagaccagcctgtctctactaaaaatacaaaaattagccaggcatggtggcacacgccttcagtcccagctactcgggaggctaaggcaggagaatcgcttgaacccgggagacagagtttgcagtgagctgagatcgcaccactgcaccctggcctgagcaacaaagcgagactccttctcaaaaaaaaaaaaaaaaaaaaaagtctttcacagaacaaaatttttaattttgatgcagtccaattcatctatttttcttttatgggtcaagcttttggtgtgatacctaagaactcttcacttggccctaggccccaaagatttttctctcctgttttcttctaaaagtttttcagtttcacattttacatttaatttctattttattttatctttgagctaatttttatattcgttgttaaatcatttctttctttttctttttctttttttttttttttttttttttgcctatgggtgtccaattgctccagcgccacccatggaaaaggctttcttcctccactgaattgtttttccactttctgaaaaacccattgggaatattggtatggatttattcccttttcctcactgggaagtgttggcagtgtccagcaggtagctgatccttcattccctgcttggtggtgctgattccccaactgggatagtgctggcagggatgagtggggaggtcatcttctaacccccacctggcagaagacagtgctctgactctctctctagggtagtgtcaacagagtctagcagtgacaagatttcatgaagtgtcatgaggtgggactcatcacctctgggcttcactcccctcccccagcctacctatgtcagtagagcctggtgggagcctgagcctctatccccacccagcatcagtgaggtaaaataaggtagtgagatgcagggcaacttggcattctactctcccatctcctttctgtgtttcagtgttgcccacaggggagctgatctaacattacttactcagaggcaatgaggtggtatgagtgattttatacatagatgtatacataagtatgctagattgtctatgaagttcatttcaggataccaaagaaatattacaaaatatttgttattaattctcacaacaatcctaggtggtattagtgtccccatttcacaaatgagaaaaccaaggctcagagagatgaatgatttttccaagtgagtaaatggcagagccaaaatctgaccccatgtctgcctgagcctgacccaaggcctcggaactcccctgtaaagcatgataatgatgtggcagagtttattctacgatttcaccaaaccttgttttcttttcctcctggaaaaacagatggactacatttcccaccttcccttgtggttagcagaggtcatgtggctaaattatggcccctgaaacatgagtaggagtaacatttgtcacttcaaatctggaccccccccaaaaaaaatgcccacataattgtccatgttcttgttctctctcttccctctatgccagctggatgcaaaagtatccagcagaagacttcaagaccttacaaaatatcagacccacaaggtcaaaggaacctggatccctgaatgaccatgtggaacagaatccctccttcctcagatccacaaatgtactgtggcataaatgagatataaacttctatatcaatacttgcaatttgggcattgtttattacatcagttagcctaccctaatataagtggtgtcaccaagagccaaaagcagccactctatcctgtctccaacccccacaccagctcccaggtgcctccgcccacctggttggaccctagtcaaagtcttcattttgcttgtatgaaggctgttggcttgttggactggaggcagagtagatggcttggtttcctgcttggactgctgccatggaacataatcctacaaaatatacaatcagtcacatagcaccatgagtttatatcccagctctacccttttcagatatctgtgaccccaagcaagtgacttgacctctcctgagcctcaatcttctcatctgtaaagtggatctaataataaaacctacttctgtggattggcgcaagaattctgagagatatttatgaagcatgtggtaagtgctccataaatgttagctatcacttttttaaatcagccagccagaatttactaagcacatccaggctgtgaggtgctaagaactgtgagaaacagaaggcatggaaaagacgcagacatccaccctcaggaaaccagagcagcaatcagatgaataagagagcagcataatatacccttacattctgataagacagtgagaggagaaaaatgaggttctgaggcttgctctgggtcccacagcaaagtgtgacccggctgggactggaattcgggtctccagcctatatccgcggagcagtcacgaccgtgagagtggagagcaggtggactgcagggccagcgagcctcccaccccagccctagtcccccaagactcaccggaacctggaactcctggactatggagtgagtcccagagtgcttgggtctggaaagagttgggaagggaaagaacttccattatccccagcccaaggggcagcaagcagcaattcgaaacaggattggagtctcgaaccagaaactgcagtttaccggggacaatagccccgcgggagtggggcggggccaaggagatgtgggcggggagaggacgggggtcagaagaccgagggcgacctcgaggcgagggcgggacagcggcggggtgtgaagtacgcatgcgtattccgcctttcttccaatttttttttttttttttttttacctacttttgtaagacatgcgccattggggaaaatggaagagaagttgcgagtctgtgagaccctgatcttctggtataactactcggcttttccaacttccttgtctcagtgtagatcgcgcggtaacccaggccactcagaagtcccgagacccgatgctttcgccagcgtctcggtctccaaggaaacgcgacgccgcctaccgagcgcctaaagggactaacctctcaaggcaaaatctagttcggcccgcttttcaattttcaaattcccttcagtttgctctgcccataatcctaaaatatgatatcatatttctccactctcatcaaacttccaccatttccttcgccatcttcactcttggctaatgagtttgcttccaattttactaagaaaattgtgggaatcagtaaacccacaagttcatggcatcatttactcgcctacttgcctccctcccgtaactacgtataaactgcctactaagaccaattcctacatttatgcaccgaatcctatcctctcacgttttctcaaagatattggccgagcagttctccccgttttttcctcctcttttctctctcctttgtatcatcagtataccaacgtatttttaaatttcttctatttaaaaagattgtccacagccggacacggtggctcatgcatataagcatgagagcactttgggaggccagaggtgggaagatcgcttgagccagaaaggtccagtctgcagtgagccacgatccagccactgcattccagcctggttgacagagcaagaccctatctctaaataaataaacaaaccacttcccctccagccagctcccatttctgcttcattttaaagcaaaactcctagagaggtttgcctactctgtttcccatttttttccctcctctcaatcaggctttcactccccactgaaactgccctcgtcaacatcattggtgacctccactttgctaaaccccatggtcacttctaggtcctccctttatttggcctgtctgcagcatttgacacaacagatcactccctcccctgaaacactttcttaacttagtatccaggaaaccactcttgagttgcttcctgcctccttttcagtctcctttgctggttcctcctcttctccctttatcattgtagtatcccaggactcagtcccagccccctcccttccagtctcatggttttgaataccatccgtacccagatgcctctcagactcacgtctccatcctccccctgaattccagccatgtacatccaactgcctgcttgggccccttataagcaactctaatgtgcaatatttttccagaaacatttttcccgaacttaaaatagggcatctctcttcttggaatcatccttaactcatctcttatcccacatccatcagcagatcctgttgcaataacttcaacgtatatctggaataggaccacacatacacacacacacacccctctttccttttgtaccccaactaaagtactagttcccacccttgccctacaccaattctctctctacacaccagatttgctagatagagcacggatttaaaagagaattccagtttaaaagataattgggcgggagcaataattttaaatcacttaaacttcaataggggaacattgctatagaataccatgtcagagctcccaaccttttctgcctcttaaaaatcacaggagaatgtgtttaaatgcactgtggtaaatagaagcagctgctaggataaaaagcaattagcccaggtactctggctattcaggcccctcctggctgaccctagagctgagggaatcactgtgttgggtaccctcatttgcagagcacaccatatgacagcactcttgctgggcaactctgtaccaggaaaccattaaaaagtaaaagataaaggccgggcacggtggctcacgcctgtaatctcagcactttgggaggccgaggcagatggatcacctgaggtcagaagttcgagaccagcctggccaacatgatgaaaccccatctctactaaaaatacaaaataggattagccaggcgtggtggcgggtgcctgtaatcccagctacttgggaggctgaggcaggagaattacttgaagcagggaggctgatgttgcagtgagccaagatcacgccactgcactccaacctggacaacaataatgaaactccatctcaaaaaaaaaaaaaagtaaaagataggaatacatgacagatccaggtagtgacttactcaacagccattcctccccatcatcgcaactattggatcctgatcttgtccatgtatgcacttgccttaatggaggcaggccccaggtccagccctagtcctagtcccagctccaatagtcatgactgtctgaggctggacttggtgagccaatttccctttccagttagaggtctagtcatagatacatgatgaaagtctggctaagaagacaggatgagaaatctactcaaaggcttttgggaaaggttttcatcacacttttaaaaaaaggcattgcagaaaaacattccttcatctgctggtagacattgtcatatctgtgtgggattcctggaatcgcggaactgtgaggggagttggccaaagaggatatacagtgaatggtagagaggaaaatgtaaaaaccttcttccttgatagcactgttgagccattaaattaaccaaccctagcctggcacaatagtatgtgcctgtaataccagctacttgggaagctgacgcaggagcatcgcttgaggccaggcatttgagatcagtctgggcaacatagtgagaccacatctcagaaaaaaaaaattttgttttaattagccagatgtgatgatgtgcacctgtagtctcagctacttgggaggctgtggtgggaggattgcttgagcccatgagtttgagactgcagtgagctatgattgtgccactgcacgccagtctgggcaacagagtaagattctgtctctaaaagaaattaattaattaaattaacctttcacctatctagaaaatacttgagattaaataagaaatcacattactgggtgagcaaatttgagttgagttttctggtacttgcagaccaaaagcattttactgaaccctacgtctggaggaacaacaagatagaaggaacctgggtgggtccctgacaaccttgcaggagaaagtcacctacctgtccttactgcctgccaaattccgagctgcttcatcaaagagaaataaacctccaccttgtctgagaccctgtatttgagagtccctttgttacagtagcttaacctgtaccttgattaatacaaagaagagcttggccactgtcagacagccttcctcatcagacatgctgacccagcatggacacccactgagagctgcctgtgccccacatctcaggtacttaaccagtaatattactgcctcccacttcaatttttttttgtttttgagacagagtttcgctcttgttgcccagactggagtgcaatggcatgatcttggctcaccacaacctctgcctcccgggttcaagtgattctcctgcctcagcctctcgagtagctgggactacaggcatgcgccaccacaaccggctaattttgtatttttagttgagacggggtttctctatgttgctcaagctggtctcgaactcctaacttcaggtgacccgcccgccttggcctcccaaagtgctgggattacaggtgtgagccaccgcacctggccccacttcaaatttttaaaaaaaatacataaaaacatttgcaaaaatgctgccatcttaatcaaagccaaaacacacttgaggggccactgacaatcacctgtaacaaagctgttggaactgggattgaatcagatggggtccatttgcacttacacctgttcaggtggcatttctgtgttcacgaacacctgatggaacttcctgcccccaggataggtgggcaagatgagctggcctttcctccctgcacatgtgaggtgataaatgtgatagagggcctctcaggcctgcttggctccaggctcagcaatggcaacctgggctctgattccatcaacatcttgctgagaggtggactaggctgagcaggcagtctcgggcttccatccatgtcatttgatgtgctggctttgtggcaaatgtgcacagcatcctaaacccacaatccctactgttgtcactgggtaagatgccgtggttcttgtggagacacctgctatactcgacataacaagatcctagacattccttcttatcatctgcacagccctccagagctgctctctccatacggcctcagtgcccatccggactgctctccttgcagggtacctgcctggcccctgtagctcctgatgtaataatctctgcaaaatttgacctggaaaaaatgaaactgaccaaaaggatggccctacacataccaatgaaattgtacaacagaagaagatatgattagcaaaattggacatggagccagaacctaatccacaagtcaaatattttcaaaatacagacagatgcctttaaagtccaacacaaaacaaaaatgctcaaaatacgttgattatatgagagttcctgactagtgcagtaagacaagaaaaagtataagatttgaaaaaagagacaaaaccttcattattcacagacgatatgattggcaatacagaaaagtaaagagattccaaaaaccactggaaattttttaaggtttcaactttgttgccagatatggggtcagtacacaaaattcaatcgtgtttcctctaacggacaccaacaaaccatatgtaacttctgatttacaataatttcacttacaatagcagtcaaaccacgtggtactttggaataaatccccaaaagtatgtaagacctttatgaagaaaactataatattttattgaaattcataaaataaggcctaaataagtgagaaatcaagtggggtcattgatggaaagactccgtgttataaagtggtaattctgtacaaatgcagtgcaacgccaattaagatctcatagtttcctggaacttagtaggcaggttgtgaaatttatatggaggttccaaatatagctgagaccatcttaaagaagacgaaagagagagaagaatgtttcccataaaagaagaaactggagttcagatttctctttggaaactgaaagatccccccacagtggaccctcacttctggagaggaatattcagctacagttgactagcagttgccccttcagatagaatattcgatctccagttcacccagtatatcttctacttaaggcacctgcctgacccttgcagatatttgattatgtgatagttacctggagtgagggcttaagataagaggaatggaagagattgtttaaaatacatctattgtttggttgtgtaagtattctcctcatggtgaaacttgaccaggcaagtagaaagaataacagagaagtatgtgaatctaagacattgatgtttctggtaatggtgaagttccgagtatgatcacgggaatgcgtggctgagaagggataaaggaaatggtgcctgaggatataaagtgagaggactggaaagtgcaaacggcccaagtcagtggctcccctgagaccaataccagcagttgggatgaagggaatctgcctgttaacaaggtttcctaggatctgatgcacagttcttgatccacggcgtcagaaataaagtggttaaataaatataagctaccggccgggcgcggtggctcacgcctgtaaccccagcactttgggaggccgaggcgggcgatcacgaggtcaggagatcgagaccatcctggctaacacggtgaaatcccgtctctactaaaaatacaaaaaattagccaggcgtggtggcgggcgcctgtagtcccagctactcaggaggccgaggcaggagaatggcgtgaacccgggaggcggagcctgcagtgagccgagattgagccactgcactccagcctgggcgacagaccaagagtccgtctcaaaaaagaaagaaagaaagaaatataagctacctatacgtggggctgcctattaactccgccaagtgacttaactcctgcctctttatctgtaaaatgggcataattacagcattgtttttggaagattccatgtaataaagtctgaagtgtgcttaacacagtactgggaacttaagcagcactcacacttcatcctaaatacgacgaaagtcttttcaaaaaaataaaaattaatgcaatatgacttacttggaaatgtatcaaaaaataaagaccgatgaatggatcgaggcgtagtgtgacagagtaaaattttaatgataaaaagttaatggtaaaatgttcactgtaaaactttcaacttttcttcttgaaaacgtgcataatccgacgtgggaaaaaaaataacgcattgcagtcagttctggggaaacggaaagctaagttttaattttgctattgcttttgcttttttaacagaaaaggtacaaaaaagaaaaaatgggagagatgttgccgaactccgtcccgcctgtgggctgtgggccgttagcaaagctgctagcatgaaatcgtcgagcaccgcttgcgaaacgccaaatcctcgagagcgaggccggaggctgccaaacccgcgctggggaaagggccgcctccgggcgccccatcccgctgcggacggaggtgaggttggagcgagcgctggcggaagagaggctcagcgcagggggcgcagagccggcgctggccaatatgcgccgcatgtgatacctttgagggcgcggcgggggagggtagcgtcaaatttcaaaaaaaaaaaaaaaccaaacccacacagccccggcgggcgggcgcgcgcgatgggcgccctttggctgcgggagcgagtggaggatgctgggaaggaggtaaaatggccaccggcggcggcgcggaggaagagaggaaacgggggcggccgcagcttctgccccccgcgcggcccgcggcccggggcgaggaggccgacggcggccgcgagaagatgggctgggcccaggtggtgaagaatctagccgagaagaagggcgaattccgcgagccgcggccgccgcggcgggaggaggaaagcggcggcggtggagggagcgccgggctcggcggccccgcgggcctggcggcgccggacctcggcgacttcccaccggctggccgcggggatccgaagggccgtcggagagatccggccggcgaggcggtggacccccgcaaaaagaagggcgctgcggaggcgggcaggaggaagaaggccgaggcggcggcggccgccatggcgaccccggccaggcccggcgaggccgaggacgcggccgagcggcccctccaggatgagccggcggcggcggcaggcccgggcaagggtcgcttcctcgtccgcatctgtttccagggagacgagggcgcctgcccgacccgggacttcgtggtaggagcgcttatcctgcgctccatcggcatggacccgagcgacatctacgcggtcatccagatcccgggcagccgcgaattcgacgtgagcttccgctcagcggagaagctggccctgttcctacgcgtctacgaggagaagcgggagcaggaggactgctgggagaactttgtggtgctggggcggagcaagtccagcttgaagacgctcttcatcctcttccggaacgagacggtggacgtggaggacattgtgacttggctcaagcgccactgcgacgtgctggccgtgccggtgaaagtgaccgacaggtttgggatctggaccggggagtacaaatgcgagatcgagctgcgccagggggagggcggggtcaggcacttgccaggggccttcttcctgggggccgagaggggctacagctggtacaaggggcagcccaagacatgctttaaatgtggttcccggacccacatgagcggcagctgcacgcaggacaggtgcttcaggtgcggggaggaggggcacctgagcccttactgccggaagggcatcgtgtgcaacctctgtggcaagcgaggacacgcctttgcccagtgtcccaaagcagtgcacaattccgtggcagctcagctaaccggcgtggccgggcactaaacacccgcctgcctgccagggtgaacacacagccagcttatccctcttaagtgccaaaacttttttttaaaccattttttatcgtttttgaaggagatctttttaaaacctacaagagacatctctctatgccttcttaaaccgagtttactccatttcagcctgttctgaattggtgactctgtcaccaataacgactgcggagaactgtagcgtgcagatgtgttgcccctcccttttaaaattttattttcgtttttctattgggtatttgttttgtttcttgtactttttctctctctccttgcccccctcccgccctccccgccccataccttttcttcccctggattttcaccctttgggctgccttgctcatctttatgccccagcactaggtacggggcccaacacgtggtaggcactccatcagtgtttgctgaattgaaaacattgttgactgtggcttctatcagagtgtctaccttttgcagctcttcccctccctcatttaatttgctgcttttaatctacgtggtctgagaatttgtgaaaccagtgttgttagaagtgtatataatctgaatcaataagctctgaatggtggccaagggcctctcttatggcacaaagatgcatggacttcatgacagctcttttggtggctcagaagccattttttatagaatcatggaatctagaatattcctgctggaaagaacctgagagttggtttggaccaattccctggttttccagcagatgaaacaggcccaaagaggttaaatgactgggtgaaaatcacatagctgtctggtgccagagccagcctatagtagagtcccctgaccccaagcccggtgctcattccactacctctcacacttcacaacaatttcctcaacacttgagggcccagaaagtctgatctctccagaatgatcagcccagaggaatgctgagaaatcacctggaggagggagcagaaagagaaggtttttaaggaggggcttctgaatacttgggagatacggaacggaccaaggaccacactccagggtgcattcgttgctccctggggcaccacttctggattacagtgtgccaggtcctttggaggccctaccccttccccattcattgccaccagtgagaaatgggggtgcccctgtgtaaagaaacctaccaaaggtttacatttgcaccttagcctcaatagctacgaaccctagagaagcagctagctggagctcatgtgcaactcctgattctcaggagaaagatggattttaacccaaaattatgagtgagctgttaactctaaaatgtacttgggagataggccaagcgagaggtcatgggccaactaagtgttatccagtagaaaagacagtacactgcttttcttttagtgtttgcttttcctttgctatatgttttgctatttccttgtggcttagaatgtaaaattgattgttaaaagttttgttctgaataaatatttatcttttgtattgctaaaactggtgcactatttcctttcaaagtgttagatgcacagttacccagctccagaccgtatttcaatcccacttcccctacactccatttgtttaccttgctaaatacatttcccacccctgcaggcaacacttagcacctactacgttgtgccggtccctttgcatcacaatcagcacactgttaaaacgggttttaagtcctaacacagttccaataaatcagaatcactgttagaggaagtgaaacattttagttaatcatcctcaagcaattctgatgggcagccaggtttgagaccagagtataagatgtgtgagctgaaccctgccctcagggagattacagacctgtgggaaagagaggtggtttgccagcttcctcgtctttctgttactgtaagcgcgcgctgtggatgggatgcaaaatattcttgggttctgggaaaatgccatttcttccagctgttgaaaaagcgggatccagggagctgacttctccaagttagcccccactggagactgggcctgcaggcagaatagggtcaaggtccctggacttcaggtccaataccctgcagaccccagatacaactctctgaaggattttccagctggtgatgctaggatgatctgatcctgagagttaaacgttcccagtatattgactctgactcagtgatttgaggatatttccagagctgatctggagttgggacctggtaggctcttgggaatcctgtctttcagagccagttcaacccctctccttgtctcccaaagcaagcagactctcccctccctcccatccctctttcccgtctttgccagcggtttccctccctctcacagagctggaggccaggggccaggagaaagcctgcattcaccatactctccactccgttcctcaaagcaggcactgtgccagggagcctccttgaaggaaccttccctctcctggccccatccccccactctccaggagggaggagaggaagaaactgtttccctgcccatcccccacaggatctgcttcaaggcctcctgcctggtggcccagggacagccaggggctggagctgaacaaacctcccccagcttcctttcctgatcaagcagccctcaaattacaattcttcactgtttttgggctcctggaaagtgtgcagagatgcccggactgaggctggttgactaggggacattgattcattccacttcaacaaatacggagggcattagagctgggccccatgcaaggccctctgcataggctgccttgaacaagacagtgcacttgcaatggaaggtacagataagtaacagtaggcaatgtttacaatcatatatttaacaatttttttttgagacagagtctcactctgttgcccaggctggagtgcagtggcatgatcttggctcactgcaacctccacctcccggattcaagcgattcatgtgcctgagccttccaagtagctgggattacaggcacgtgccaccacgcccggctaatttttgtatttttagtggagatggggtttcagcatgttggccaggctggtctcgaactcctgacctcaggtgatccacctgcctcagcctctgaaagtgctgggattacaggcgtgagacaccgcacccagccaacatttgtcctgtatagaattgtctgaagtaaaggtttccctagaagagaaaacgtcctgactgaaacctgcaagatgagtaagaaccaggctaagagtgaagagacagccaagcagcagaaatagcagatgtagaggcctggaggccagagagcacacagcgtgttcggactggccaagagtcaggggaagatgtggctgggagaaaacgccgagaagaggtgtcacagggcttaccagccatatttaaaaacgtggattttgtcctcagagcctccaatcaggcctcctccattccattcattctttcaacacatgcctgttaagcgccaactctataggggccttttctaagcgatggaacacagcatggagcaggataatcaagtccctgaagctcagattctagagtcacacaagtacataattacagacgatgatgcactaaaagaaacatacagggtgagatccctgtttaacaagcaaagctgatccagtcttaaggatcagagaaaatgtttgaactgagatggaaaagacataaaaggagttaatcgagagatggggctggggattaagggatggcaagggtattaacctaggcaagagggatagcaagtaaaacaaccctatagtgggaggaggcatgaccacttctagagactaaatgaatcagtctaagtttagaaacagaaaccactcttgctgttgaagaaaatgctggtccctgggctgggtattaggaatgactcctagaacaccatagaactgccaggggagttactacctctcacagtcagaaagacagaagccaggaggccaccactggaaaggctgagcatgaggacacaatggtgaagctgccacccaaagacaggatcctgggatcagaaagtcactgccaatgccactggcaggacagtgaaatgccaagtcctttccctgcctctacaaagccagggactgtgcactactgtctccgcaaccatttacaggtaaaaacagcccaaactgtctggcttacttatgcctcccttccatcttttatgcaaatacatctaagtgctagagccctagctgcaagggagttgggagatgttttagctttccagcatccgcaacataggaaggcacatagaatggggatgggtgctgtctgtcaaaagacaatatccagcacaaaaaatgtgactgcagtgcagagaagaggagctcgtgggagcatctggtaggccatgttaagaatgtgggtctaagaacgatgtgccattgaaggacttgcaagcaagagagtaacatgattagattggttatgttttacaagcatcattcaggatagttggtggagactgggtcagaggagagcccaaggggaaatacagtatagttcacccaggtctctcgagagatgaggacatcttaggcatggaaggcggagatgtacagagagaaacagccgagtaaagaaatctttcagagtttaagtcaacaagatttggagctatatttgacatgggctgggagaaagttaagtaccaaggatgttgcccaggtttctagcttctgcagttggatggatggtggggcttttccctgagatgcgaaacagaagagaaaatccaagtttagggtgaagggcttgaatttgattttggatatattgagtttaaggtctccgtagaggatatctaagaggagatgtggagtaggcggttggatacacacagatcttacattcctaggagaattctggccctgagaaataaacacaggagttgtacagctgtggctttcaaactgttttaccacatcccacagtaagatatatattttacattgcagccatcatacatatgcatgtgtgtatttatatctaaatctgaaataagcttcctcaaacaatatttgccctgtgcatgatgcaccttgacactttctattccattgcttcatccttttgtcaatgcttatatgacgtgttaaactgatttcacactctcctaatggtcaagagagaaagcagaaggaaagattataccaactaagattgtgcctcaagcaactttgacacagttttccctgatggaaaaggagatggtgaaaaactaataagggacagccagaaagggagaaggaaaaccagaacgtgcagaaacacataaaccaagggaggacatttcaggtggtaggggttaacaattgtgtcaagggctgcaagaaatcaagtaaaatcagctctaagaaatgtcaattgaggccgggcgcggtggctcatgcctgaaatcccagcactttgggaggccgaggcgggcggatcatgaggtcaggagattgagaccatcctggctaacacagtgaaaccccgtctctactaaaaatacaaaaaattagttgggcgtggtggcgggcgcctgtaatcccagctactcgggaggctgaggcaggagaatggcgtgaacccaggaggcggagcttgcagtgagctgagattgagccactgcactccagcctgggcgacagagcgagacgccgtcaaaaaaaaaaaaaaaatgtcaattgagatcagaactgaagagtgccctaggattgagtagtgtggaggttatcaataagggccttttagaggaaagtgatgggggcagattaaggagcaaatgatctttctaagatgtcaatctggcacgctgaccattttattcccatgtcacgtcctctgggactcccttgtgcacttggaacccagcctggtacccgatccctttcacaagaggctcctggactcctttccaaccttactctcagccagattgcccattacatccctttatgtcaactccagttacggctgacaaacagcaaccagaaagaattttggagtatggagtggtacaagaccaagctaaggggccaggtgcaatggttcatgcctgtaatcctagcactttgggaggcctaggcaagtggatcgcttgaggtcaggagttcgagaccagcctggccaacatggtgaaatcctgtctctactaaaaatacaaaaaaaaatagccatgtatggtggcatgcacctgtagtcccagctactcaggaggctgaggcaggagaactgcttgaacctggtgatacaggaagggaagtgctgggaagggaagggcacagtccctttaaatgacatggaagggagaaagggcgtggtccctggctagggctccaccccagcctgtgcccatggacctaggtgaggacaggcatttttgttttcctgcccaaatgttgcatttcccaagaccaccctggccggccacgcccccatcctgtgcctataaaaaccctagcaggcagacacacaggtaactggacggctagaggagcacatcagtggaggaacacacaagcggctggacgtcgagaggaacgcaccgacaggcactgacaaaccagcacaccacaggccatcgaccaacagaactatgcagagtttggctggggcagtcggaggggagcctgggccactgaacagtccaactccaggggaaaaccttctcactccatccccttctggcttcctccatctgctgagagatacctccactcaataaaaccttgcactaattcttcaagcccaggtgtgatccaattcttctggtacaccaaggcaagaacccaggatacagaaagccctctgtccttgcaacaaggtagagtgtctaattgagctggttaacacaagccacctatagatggcaaaactaagagcatacggtagcataagcccattggggcttcaggagctgtaaacatccaccactagacactcgtggggtcggagccccacaacctgcccatctgtatgctcccctagaggtttgagcagcgggacactgaagaagtgagccactccccttgtcacacgccctgggacggggacaagggaacttttcccgtttcagtgggaggcagaggttgcagtgagccgagattgtgccacactgcactctagcctgggcaacagagcgagactccatctctaaataaataaataaaaggaccaagctaagggtgaggagacgtcagatcatgctgagttgagggtgggggcgccacaggagtgcaccaaacgtgtacaaaggcactgatacatacagccccatttgctggcttgtcaatgtgactaagatttggggtaggacatagtaaaagaaaataaacacagatatattatggaaaagaatgtaaactttgcagagttttaaataaaatatgactttttttttttttgaggcagggtctcactttgttaaccaggctggagtgcagtggctcactgcgtggctcgctacagcctacaactcctgggctcaagcaatacttctgccccagcctcctgtgtaactgagactacaggcacacaccaccacacccagctaattttttctttctttctttttttttttttttttttttttgagacggagtctcactctgttgcccaggctggagtgcagtggcacaatctcggctcactgcaacctctgcctcccgggttcactgtggatatatcccctcccgggatatatccatcactgtgcctggcacagctgcagcctcccaagtagctgggactacaggcacccgccaccacgcccggctaattttttgtatttttagtagagatggggtttcaccgcattagccaggatggtctcaatctcctgacctcgtgatccgcctgcctcggcctcccaaagtgctgggattacaggcgtgagccaccactcccagcctctctctttctttctcctctttcttctctttctttcttttctttttcttttcttttctttcttccttccttcctcctttccttcctttccttccctttctctctctccttccttctttccttccttccttccttcttctttctttctctttcttttctttcttcagggtctcaatatgttggccaggctggtcttgaactcctgccctcaagtgatccttccaccttggcttctcagagtggtaggattacaggtgtaagccaccacacccagcccaagaaagattttattttatttttttatacagacagggtcttgctatgttgcccaggctagactcaaactcctggacaacatagcaatcttcctgcctcagcctccctagtagccaggtgtgcacggaacaaattatatgtattaatatggaacaatctctaagacacattattaaatgaaaaaaagcaagatatggtatcctacagtttacattttttaatgttggaataaatacatacataccctcagcaccataggaaagattttaaaaaagaaaaaatatatatacatatgcttatttttgtacaaatatgtaacactggaaggatattaatgaaattcgtaatttgtaactttggagaactggatatttggggtttgggataaaaggaaagtttattttccactgtgtatccctgcttttaaaaaaatatttcatctattatctctaacaacaacaaaaacaacttttaacaacaaaaataaatgcaaaacacaagacttcaacgaaattcctatagactttagagagacaggagtccatctcctctatctttaaaagtaaaggccgggcttagtggctcatgcctgtaattccaacactttgggaagccaaggcaggaggactgcttgagcccaggagtttgaggccagctgaggcaacacagggatatcctgtctctacaaaaaaaaaacaaatcgttgggtgtggtggtacatgcctgtggtcccagctacttgggaggctgaaacaggaggatcacttgaggttgaggctgcagtgagccgtgatggcaccactgcactccagcctgggccgcagagtgagaccctgtctctaaaaataaaataaaataaaataaaaataaaaaataagaactttgatggaagagtttaagaaattctatagcagacaacacattggtctccctgcttccaggctccctctccttccaaccatggaatccaccccaaaacaaaacttgatcacatttctcccccgcttaaagaacttcaaagattttgcgtcctccctggtgttcaccagggcctgcctgaccagccctgcctcctctgggcctcctctcttgtcgggcctccccctcttaccctggcttggcttccccttctgctccagctggtcattcctggaagcagatctcttcctcccctacccatggttaatccttacctgcctggggcactcagctctaatgctgcttcctaactagagcctaccctaacatcctgtatcagaccctcttacaccgtccgttacctccctggcctctccttcagcagttactcgggtgcaatgatatacttatttgtgccatggtttgattgatatctgcctctgcctctccactttgagctccctgagggcaggaaccagtctcttttggctcacggttatagcttgagcaattagcactatgcctggcacagagtaaagcctaataaatatttattgcatgcatgatctagaatcacttggctgaggttacagattaagacacgtgtctacttgtccttctttaatatacttaacataccttagcactctgtcattgacacatactgaacaagggcttattcattcatcttttaaaagctaactcactcttttagttttcccacctttgataagggaggataggacctgggaggtcaggccctcggtttactagctcatcctcctctatttctctgagagcataaaatcactggaagtcagccagcatgccccatggcactgtgaggcacaggggagaagcaccaggctcctggattctgaatgcgtggctttgaagcctggcaagagtggccccttccctgagtcccccaccacccctccccttggggcgaggattctgcaggcatgagaagtgcccacccagagtctgtgcctatgccttctagaacacgctctgatacccgataattcccttccaaaatgtcactaagttaattcacagggctctttgtgggcctcatccctggcttcatctcacctgagggcaaactatactgcctgatgcacatcttatagacctgagccttgggcctcaagatagctgtttgcaggtgacagctaggtgttgacccatgcatgctagctccatcactgatgggatgagaggtagctggataagggatggatacaggttccaggggacaggtctccttgggcctacacattctggcacataactccaagggtcttagaattctaatttgaacatggccttccaggttgttagaggatatatccatcaaggaagaaaacagaacatatttcatttaacacttgctggactgttgtataatttctaactatagagacatatggtatatgggcctccaactctactcttgttctgagccccacaaatgcccatttggttctgtcatttctttgcatagacaagctacataacctctctgaacttcagtttcctgagcaggaaaatgggtctatggtaataactacattatcagggctggtgagaaaatgaaataaaataatccatgtcaagggcttgagaagaatgccctctggctgtcgtctcctatgacttcctgtatgatctccaaactgctctctttgcagggtttcaacacggctgctccctcctgcctccttacccacagccaataacctccccattctctccacctagtcaaatcccaccgtcttcaattgtgataatagctggttgattgcacgtttactacgtttcaggcattgtattaagaactttccatgcattaactcagttctgacaccaactcgatgaagcaggcactgtttattattccccaaacacaaagacacagggatctggagactggaagcactggcggctgcaagtggcagggctggcggggtgtgaagccggagaggagtctttctgcagtcaggcctcccaaatcccgggatggaatcaaggagcctttggctgtcccacccctcctcctccaagcccccaaatccaagtctgttatatcccgtcagctctgcgggcctgcctgtgactttcagcccaagggggcgggcacttcgtgtcacgccacgttgtccacatcatcgaccctccctccccttctccccttccttccttccctccctctcttcctcccattgagtgccagttctgtgccaagctttgctgttcaaaatgttacgagtggagaagtcagggaaggatggaattataggtgtttcttcttcatacctttctgtttggctgattttttttcaaatgagcacgcaggcccggttcctcaaacccacttccaatgtggcattgctgggttggtttggtccaaggaaagccctgtctccttaactcccagcccccacgcctcctccgccggcccccaaatccaggccgccctgccccctccggaaaggggagttgggggcgagcgccgaaatctgagtggctctttcaagcctccgttgccatagaaaccggccgcacaggccgatgctgtccattacaccatcctctagcctcgcagccaatggactccgagctccatcgccagaggccccgccccccagctctggggagtccaccaatcagcaggtcccgtgacttagagccctgccctcggcccagggacaccaccaatgcgcttcgaccctgccctccttctcttcggtgtaacaagaagactcgatatttttttttttttttttaggaattctccagatcagaaggaattggcagtaaggcctctgtcagctgcaccctgaataatctttggctgctattttatttaaggagagcaaaactgtttcaattacgcaacaatatataccattctctactaaaacaattttaggaaatgaaaatgtaggcaatgggatgatatagtctgctctatatgaatgtctttcattataggtattttaatttaacttaaaatgatcaaggaactagtcatctttcctttgtatttcaaatgcatacaaaattaaagataccgagttttttgatgcagagttcatgagacattgacttaattagttggtaggcaacttttactgaaccatctaattcctggttcagaacattacaactggaggataaatgaatatttctcttaatccatggaagaaattctgtttttgaggcgggctgcgtaaatggctctgacactctggagtctaaataaaccaaatgtgtttttaaaacccgtttgccattacaaaaaaaaaacttcaattttttagaacacttttagatttacagaaaaattgtgaatataaagttcccgtctaccccagccacccaccctgtttctttcattattattattattattgagacagggtcccgctctttcacccaggctggagtgcagtggcgcgatctcggctcactgcaacctccgcctcccaggctcaggcgatcctcccacctcagcctcccaagtagcagagactacaggggcatgccaccaagcccagctgatttttgcatttttcatagagatgaagtctcgccatgttgctcaggctggtgtttctgctattaacatcacatatggtattgcagacgcatggtatatttgttccaattaataaaccaataatgatacattatttattaattagagttcacagtttattcagatttccttcgtttttacccaacgttctttttctactccatctttttctactccaggatccatccagcatgcctcatcgcactagctgtcgtgtctctctgggctcctcttggctggggcggtttctcacatagcaacatgacatcactgttggtgctgcgtcaggtttctctactggaaagtcagtcttcttttgccccttttcatactgtactctttggaaggaagtcactatgctcgggccacacttaagtgaggagttatgctctatctccttaaggttggaatagctacatagattatttgggatttttctacactgaagatttgtctcatttattcagtaatttatttatatcagtatggattcacagataattatttaatactttaggttataatccaatactatttgattttgttgctcaagttgttccagctttggcttttgggagctctttcggttggctcccgtctccctttgacacacccctatttttgtggggttttctcgttgccgtcaagcacttccttactttctggcactacaagatgcctcaggctcatctttcgtatttcctgccccagtcctcaaatcagccatttcgcaagagctttgattgtttcggagaagggtatttattagaaaccaagaactgggcgctaggtgcactcattgctactagggtgtcatttatttccttcctccctccctccctccctcccttcctttttgagacagagtctcactccatcacccacactggagtgcacactcatggctacagccacgtagccatggtaatgaagccataacctcacgaagcttccagtttacacaattagagggttaattaccaagttgcccagcactctgcagtgtgctgtgtaggcaatgcgggggtaaattatctgaagagaatttaaagacaataaaaactgcagcctagacctcctgggctcaagtgatcctccctccttagcctcctgagtagctaggaccacaggtgtgtgccaccacactcagctaattttaattttcaatttttttttttgtagagataaggtcttgccatgttgcccagactgatacaactcccggcctcaagccatcctcctgccttggcctcccaaagtgttgggattacaggcgtgagccaccacacctggccttggggtatcatttcttttaagccttctcaactgacagaacaaagaaatatatctgtatataccaatgtgtatatatatacacacatatctatatttccatttgtaaccatctgtatatatattaagctaaacatgagttcctgtttatatttaccacttgaatccagggatcatttggcttgcttcctgcttgcttatctctaaattcccactccaataacgggaaacctggttcccatcatccacatccaccatccatttacttaattgttcaagtccagtatacatgtgtaggattatcaaaattgttaacccatacccctgtgggaaactttatcaagtagagtacattcttctgaacactttcttttgcctttagtgttccagcagactccacttgtttcttttttctttttcttttttttttttttttgagacagagcctcactctgttgcccaggttggagtgctggagtgcagcggggccatcacagctcacagcagccttgacttcccagtcttaagtgatcctcctgcctcagcctcccaagtagctgggactacaggcatgcgccactacacccatctaattttttaaaatttttgtagagatgggatctcactatgttgcctaggcttgtctccaactcctgggctccagtgatcctcccgcctcagcctcccaaagtcctgggattaaaggcatgagccaccacgcctggcccactcatttctaaagttacttaggtcagcacgttttcctctatcctcttcatgaggtcatttcacacatttgtaatacggtgaagatgtttgtcatattctgcatgacattttggaattatctaaatgtcctaagtgatttttttaactttgcatgcattaaggttcactttttgtgctattaagtttaatggatatcaaccaatgcacagtcatatacccacatttcttcaccctaaaaaaccccctgtgctcacttattgaaccctctccccgccaaacactggcaaccacacatccgtttactgtatctatggttttgcctttttgtgccattattaaaaaaaagaaagacgcacaatatttttgttgttgctcttgtcacagctgccacccattgaatccttactatgtcccaggtccagaattacactgtcccattttgaagatgaggaaacagatgcaaatgagttgaagtactccctagagactcataacaataagcaaagtttgacttctatgattaacttctgagtcacctctgggaatatttgtaatatgtctaatagccacacttcttttgtttgttttgatacaggggtcttgctgttgcctaggctggagtacagtggctactcacaggtgcaatcatagggcactacagccttgaactcctgggctcaagcaatcctcctgcctcaacctcaaaagtggctgggactacaatgtgtgccactgtgcccagctatattagccacatttcaagtactcaatagccgctgtgcagtttatactattatattggtttctgagttttgtttttgagactgcgtcttgctctgtcaccaggctggagtgcaatggcacaatctcggctcactgcaacctccaccacctgggttcaagcgattctcctgcctcagcctcccaaatagctgagactacaggtacgtatcaccaagaccagctaacttttgtatttttagtagagacatggtttcaccatgttggccaggatggtctcgatctcttgacctcgtgatctgcccgcctcggcctcccaaagtgttgggattacaggtgtgagccaccgtgcctagctatattgttttttaaaagatctcttattatttagtgaaaagaaaggacctgtagtctcagttactcaggaggctgaggtgggaagatcatttgagccccagagtttgaggtagcagtgagctatgatgatgccactgcactccagcctgggcaacagagggagatgccatctcacacacatacaaaagaaaagagaccttgtaatgcacacactatcataatctctgatttttctttttttttttttttttttgagacactgtcttgctctgttgcccaggctggagtgcagtggggtgatcactgctcactgcagcctcaacctcctgggctcaagtgatcctcccacctcagcctccccagtggttgggaccacaaatgtgcaccaccacaactggtaaattttttatttattgtagagatgtgggtctcaatattttgcccaggctggtctcaaactcctaggctcaagctagcctcccaaagtgctgggattataggtatgagccactggctttttttgtttgtttgtttgtttttgtttttgatatggagttttgctcttgttgcccaggctggagtgcaatggcgctatcttggctcactgcaacctctgcctcccaggttcaagtaattctcctccctcagccttctgagtagctgggattacaggcatgcgccaacacctccagttaattttgtatttttagtagagacggggtttctccatgttggtcagactggtctcaaactcctgaccgcaggtgatctgcctgcctcagcctccaaaagtgctgggattacaggtgcgagccactgcccctggcctgacttttttaaaatcaggaaatttagatgaatcaaaaaagaaattaccttgtccctattgttctcttctcattatgaatgtctttgaggaccatgccagttggcaaataggtattttggagctagacacagttagggtgagtggagtaacacgacagtacctacaacagccacacccacacctgagttggcttcatcctgccttcaggtatcattaagaataggtattattattattattattattattattattttgagaccgagtctcactctgtcgcccaggctggagtgcagtggcacaatctccgctcattgcaacctctgcctcccaggttcaagcgattctcctgcctcagccttctgggactacaggcccgtgccaccacgcccggctaattttttgtatttttagtagagatgggtttcatcgtgttagccaggatggtttccatctcctgacctcatgatcctcctgcctcagccttccaaagtgctgggattacagatgtgagccaccacacctggccatatatatatttttttctttgagacagttccactctgtcacccaggctggagtgcagtggtgtgatcatggctcactgcagcctggaactcccaggctcaagagatcctcctgactcagtctcccaagtaactaggactataggcacacaccaccaggcccagttaatttttctatttttagagacggggtctcactatgttgcccagactcgtctcgaactcctgggctcaagcaatccttccaacctctacttcccaaagtgttgggattgtaggcatgagacaccacatctggcctataatggaatattatttggcaataaaaaggaagttctgatacatgctacaacatagatgaacctagaaatcatgatgctaagtgaaagaagccaggcacaaaaggccacatgttgtatgattctctttacatgaactgtccagaagagacaaatccatggatacagaagcagattaatggtggcctagggctggggattagagggaaggcagagcagatgggagagtgactgctaatgagtactgatgctaatggtttcttttggggatgatgaaaatagtctaaaatccattgtggcaacagttacacaactctgtgaatgcactgaaagccactgaattgtaaactataaatgactgaatagtgtggtatgtgaattacatctcaacaaagctgtttttttttttttttaatgttctggaagaatcaggatagacattacctcaggtgaaggaaggcaggagatgggatggtaaaggaattcattggggaaaacaggttatcaatgttccagttcttgtgtcagattgctgactccacagatttttattatgttatgtaaaaataaatacacacagggccaggcatggtggctcacacctgtatcccagcactttgggaggctgtggtgggaaaatcgcttgagcccaggagttcaagaccagcctaggaaacatagtgagaacctgcctctacaaaaaaaatttttcgaaattagccagccatggtggcatgcatctgtagtcctaactacttgggaggctgaggcaggaggatcacttgggcccagaagttccaggatgcagtgagctatgatcgcaccactgtactccagcccaggcaacagagcaagaccaggtctctaaaaaaaacccacacaagcataaagtgagggaatcacaggcaacaatgagaatgtgtcgcagatgaagcgattctgtatacctgagacagagggagatgaacgggaaacggcagagagtggtcaggacagtcctctctggggagcccgtttgagccgaagctaggatgagtagatgctccagcccatgtggggatgggggtgaaaagagttccagacaaaggagacagcatgaatgagggccctgaggtaggcccaagcctgttgtgtttgggggacagccagtttaaatgtctgttctgttatattgtggagtctctgtgtatgaatttttcctaaagaaataacagacaggccgggtgcagtggctcacgcctgtcatcccagcacttcgggaggctgaggcaggcagatcatgaggtcaggagatcgagaccatcctggccaacatggtgaaaccccatctctattaaaaatacaggtcgggcacggtggctcacgcctgtaatcccagcactttgggaggccaaggcaggcagatcacaaggtgaggagatcgagaccatcctggctaacacggtgaaaacccagctctactaaaaatacaaaaaaaaaaaaattagccgggcatggtggcgggcgcctgtagtcccagctactcgggaggctgagacaggagaatggtgtgaacccgggaggcagagcttgcagtgagccgacatcaagccactgcactccagcctgggtgacaaagcgagaatccgtctcaaaaaaaaataaaaattagctgggtgtggtagcgcacacttgtaatcccagctactcaggaggctgaggaaagagaatcgcttgaacccaggaggtggagattacagtgagccaagattgcgccactgcactccagcctggcgacagagcgagactccatctctaaataaataagtggccaaaaacatacatacaaaggtgttcactgccatattgtttataatagcaaaaaggggtaaaacaatcaaaatgtctttcaagaaggaactgattcactttgggaggccgaggtgggcagatcacctgaggtcaggagttcgagaccagcctgaccaacatggtgaaaccccatctctaataagaacacaaaattagccaggcgtggtgatgcacgcctgtaattccagctacttggaaggctgaggcagcagagtcatttgaacccaggaggcagagtttgcagtaatccgagatcacgccattgcactccagcccaggcaaaaagagtgaaactccgtctctaaaaaaaaaagaactgattaaatgaattacaatatactcggcagacctggacgagaacctacgcactacatggaaagagaaaagagatgtgaaaaaagcaggttactagaaattacatatagtaacattccacttgtgtaaaaaaaactatgtgtgcatgtgattataagcatttaagtttctggatggccaggtgaagtggctcatgcctgtaatcccagcactttgggaggccaaggtgggcagaccgcttaagcccaggaatttgagaccagctcgggcaacgtggcaaaactcagtctctataaaaaatacaaaaaattagccctgtgtggtggtacgcgtctgtagtcccagctacctgggacactgacgtgggaagatcacttgagcccaagaggttgaggctgcagtgagctgtgattgcgccactgcaccccatcctgggtgacagggagagaccttgtcgaaaaaaaaaaaaggccgggcacggtggctcacgcttataatcccagcactttaggaggccaaggcgggcagatcacaaggtcaggagttccagaccagcctggccgatatggcgaaaccccgtctctattaaaaatacaaaaattagtcgggcgcagtggtgggcggctgtagtcccagctacttgggaggctgaggcaggagaatcgcttgaacgtgggaggcagaggttgcggtgagccaggatcgcgtcactgcactccagcctgggcaacagagtgagactccgtcccgtctcaaaaaaaaaaaattctggaaaattacattaaaatttaaaatttactcattataatgccatttttctagattacaggagacgttcacttttcgccttatataattcagtataaggccgggcgcagtggctcatgcctgtaatcccaaaactttgggaggccgaggcgggcggatcacttgaggtcaggaattcgaggccagcctgaccaacatggcgaaactccgtctctactaaaaatacaaaaattagccaggcgtggtggcacgcacctgtagttccagctactcaggaggctgaggcaggagaatcgcttgaacctgggaggaggaagttgcagtgagctgagatcacgccactgcactccagcctggtgacagagcgagactccacacacacacacacacacacacacacacacacacaaacacaaacaccatatatatacatatataacttttgtaataataaaaaacatacttctacttaaagagaatatcaataagccctaaagtttttcatagtgaaagcccttcaaaattgcttgacaaataaattctaagtatactaactatgggaaaaatgtatgcttgcgaagactttgttagacacattttcttaaatgctgaagctataatttaaaaatgaagatttcaggagacaaaataaagtcagctggataaaaaatgtgcagagagaaaaaatataccaaaatgttaagagtgagtgtctcggccgggcgcagtggctcatgcctgtaatcccggcactttgggaggctgatgcgggcggatcacggggtcaagagtttgagatcagccggccaacatagtgaaaccccgtctctactaaaaatacaaaaattagccgggcatggtgatgcatgcctgtagtcccagccacttgggaggcttagggaggagaatcacttgaacccgggaggcagaggttgtggtgagctgagatcgtgccactgcccttcagcctgggcaacagagcaggactctgtctcaaaaaaaaaaaaagagtgggtgtctcttggcactgagacaatgaatcccaacaaattcccaacaaatgatattttttccttaaatttcagaatttttgaagttttacacaatgaatattttgtgatctgaaaattttttcttcccctcctcttccaattcaacagctgaataataatcttgtgttcattgtctgctactgcttaagacattctttccagacttagaggcttaacaaagcaaacagctaccatctcacagtttctgtgggtcatgaatccacgcagagtttagttgcatggttctggctcagggtcattcacgaggttgcagttgagatgctggtcagggctgcagtcatctgaagacttgactggggctggaggatctgattccaggatggatcgatcactcagatggctgttggaagtaggtctcagttccttgttggtgttggcaggaggcttcagtttctcaccacgtagagctttccacagggctgcttgagtgccctcgcatgacagctgacttctcccagaataaatgatacaaaataagacagccaggaggaaaacatagagctttctatgtccaatcttagatatcacaaaccatcacttctgccatattctattagttagaggcaagttcacacttaactgggaaggggaggaggaattaggctcttccttttgaaggaaggaacattaaagaatttgtgaagggccgggcgcagtggctcatgcctgtaatcccagcactttgggaggctgaggggggcggatcatgaggtcaggagattgagaccatcctggctaaaacggtgaaaccctgtctctactaaaaaaatacaacaaaaattagcagggcgtggtggcaggcgcctgtagtcccagctactggggaggctgaggcaggagaatggcgtgaacccgggaggcggagcttgcagtgagccgagatggcgccaccgcactccagcctgggtgacagagcaagactccatctcaaaaagaaaaaaaaaaaaagaatttgtgaacatgtttttgaaacacaagaaaatttccagctgatctttccccccaaatttccctcctccaatccaactacaacacatgaaactccttaatcttgctgaagcgtacctctgatcatgtcatcctgcaataaaaaaactgtccctggctccccacaacccagggaactccataacttggcttctgaggaccaactaccgtattgcccttcagctccagctcaacataaacgcatcgtattcctcatgtacactcccccatctctggtcttggcacctatccatgccctctcaatacctcgtcccagtctccttcccatctccagtcccttgcacttgctgtttcctctgcctggaatgttttacatggatggttcttcgtcatcttgagatctaaactctcccccatctctatcatcccccgtcccagtcactcactctctcattaccttgttttcttttcattgtcgtttgagacagggtctcactctgtcccacaggctggggtgcagtggtacgatcacagctcactgcagcctcaacttcccgggctcaaacgatcttcctgcctcagcctcccaagtagctaggactaaaggcacaggccatcacacctggctgttttgtattttttgtagagacaggcttttgccatgttgcctaggctggtcttgaacttctaggctcaagcatctgcccacctcagcctctcaaagcgctgggatttcagatgtgagccaccttgcccagcccctccctcccttctttccatcacccagtctggggtgcagtggcaccatcatagctcactacagcctcaaaatctctggcttaagcgttttcccacctcagcctccccagaagctgagatgacaggtgcttgctaccatgcccggctaatttttgaatttttgtggaggtgggatttctctatgttacccaggctggtctgaaactcctgggctcaagcgattctcccgccttggcatcccaaagtgcagggattacaggcgtgaaccaccacacccagcccagctttattttctttatagcagtcacaactatctgaaattatcttatttgtttacctgctcttttctgttgccctcacttgctccttaagaacagggacctctgtcttggtcactgctgtaacccagtagccccagttccaagttcactgcctggtgcacagtaggtggccaataaattgttgaattaaatgtcctctcttccagggagttgttttagaaagaatcacacactgcataaatgtctgttgaggaagaaaatgaaaaaaacaaaagtgaagacattatcttctcggctgaacttcccacaccatcttctctgtcattaataagtcctggtgtctacactggggaaggcagtccaaggttcttccagggcctaggttcagccagactttaaccatctctagctcctcagagtccgtcaaagggcctaaggaatggtaagtattaataatgtttgtttatgtatttatttatttatttattttgagataaagtctctgtctcccaggccggagtgcagaggtacaatcattacaacttccacctttccggctcaagcaatcctcctgcctcagcctgccaagtagctaggactacaggcaggcaccaccctgcccagctaatttttgtacttttttttgtagagtaagggtttcaccatgttgcccaggctggtcttgaactcctggccttaagtgatctgcctgcctcagcctcccaaagtgctaagactacagctgtgaaccactgtgcagggtcaaatgtttattaatggatgcatgcatggatggaagaaggaaaggaggcaggtgtgaataatgaatgcagcattttcactgctgagaataaagagtgaaatcctggtccaaatcagtttggcagtgagtaaggttaggaactattcacatacattggaataataatagcagcagcagctacagggtcagagacagatctttgagaggccataagcattgaaaagattgtggtacctatcacacaccgtctaaaataaaacaaatattttatttatgggaaaagtgttaaggtgttgataattccaagaaagcttttatttgtcctacaatcattactttgataccttttctgaaatcctagagctgtccccactctgcccatttttttttctcattatggtgatgtctctgggttgctggtgacctgcgtaactattgggaaatctagtttctcaaaacttttagtttttttttagacagggtctcactctgtcactcaggctggagtgcagcggctcactgcaacatccgcctcctaggttcaagcgattctcatacctcagtctcctgagtagctgggattacaggtacgcgtcaccaagcctgactcattattttgtacttttagtagagacaaggtttcaccatatcggccaggcggatctcgaacttctgacctcaaatgatccgcccgccttggcttcccaaagtgctgggattacaggtgtgagccaccgcgtcccgtctatcataagttttattgaacattgcctaggtatcaggatgtgtttacatgcattatctcatttaatctgtaaaaccaccatgtgagggagaaactgaattatccccattttcaggataaggaaaaggagggactgggaatgtgaactcaggaagtgtgactccatcgggtagactgctcaggctgcagatgtaaaggttttacacgtaggcttttccagatctcagcttctgaaaggcggagggaccgtttggacgggagcagggcctcctcttccaagcaccctgtgcctttaagagtcgccccctccctccagggatgctccaatttctttctccccaccacccccaccccgccccccgcgccgcggagccgcacctcggtccttcctccccgccccacaccctcaagctcggctcttggccttcgctcgtccagaagtgggtgagctgtaccgccagaggcgcattctcctagccccaaaccatgcccgctacgccccagcggaatgccaccttaaagaccctaatccgggcacctcccagctcctgcttcccaagggcgaggcctcagcgccccctcccatcgcccatgctcacgacgccgtgaaggtgacctcccccaggggcggcacacgcccagtggtgcccgaactggctcacacgtggtgagccgggagcgcgcggcccctccccgccacgcgcctcgtgccggccacccggccacgcccccaggactggctccgccccgtgcccctgcacgcttctccaggcttgggtggggcgacgcgcccaagtcgggcaccgggcaggctacggggtggggtaggacctgggaatggcgcacccacgcatcctcgaatgtcgcctgcggtttgtgaaaagcgggaagtccgcccagctcaggacctttggctggcaggcgaggtgccccgcggcccttggtgctgagcaggggagagacagctgggaccgcgagcctgggaatcgaatcctagtctgcgtgtcctcggtgcttcctatttggaaactgggcatcatattatcatattcccttctccctccggattcttatggagcttcgaacgagattaaatatacatatatatgagaaagggatttgttcactaggtccaaaagcatttgctggtcccatatgtggtcggaccctgtgtgtagtaggcggggggcaacatctacgacaacctgagttcgtccccttaagaagctttcctgagtcttgggccccccaaattctcttctgggatggtccgaaaagacgtccctgaaagaggaaagggcggaaatcctacctgacggcaggtgtctcggaatgagctaaaatttaaaaggcaacgcggggcagggacaagcgtccagcgtcagatggaagcaggctcgcgtcccctacccttcctccaacccctaacctaagaaaagaaaccgatctcgccggtctcccccaatcctagccgcgagaccgcccagccccgcagcccgagccccgccccgctccggcggccagcgattgggagatgcaaataccggcttctctgcccagcaacgggtgacgcggcgcccgagcgcgaggcggggcccggccgcagcccaagcgggcacctcggtgtttacacggggcggccccgcgcgcgccgcagcggcccgcagacggcgagggggaggggtggtgcgcgcgccggcggggccgcgcggggagaaagacactgaaaggcgtcggcggccgggcggggagcggcgcgcgcgggccgcggcggagccagaggctgcaggaagagcccgcgggggcccggagggtgcgattcctcggcccccgcaaaacaatgtgtgttgtgagccaggacgcaacttgccggaggcggcgggggcgcgccgagcccgcctgagaccgcgctgaccttctccccccgccgtccgttgggcccgagcgcccagctcctcgctccccagttcgcgggggccgggccgagccgcggggcggggccgcccctccgtcgccgctgcctcctcccccacccccagccgcggaggatgcggacggcccccggcggcgtctagcggccccgggcccaggcgcgatggtgcagcagcggggcgcgagggccaagcgggacggcgggccgccgcccccgggacccgggccggccgaggagggggcgcgcgagcccggctggtgcaagaccccgagcggccacatcaagaggccgatgaacgcattcatggtgtggtcgcagcacgaacggcggaagatcatggaccagtggcccgacatgcacaacgccgagatctccaagcgcctgggccgccgctggcagctgctgcaggactcggagaagatcccgttcgtgcgggaggcggagcggctgcggctcaagcacatggcggattacccggactacaagtaccggccgcgcaaaaagagcaagggggcgcccgccaaggcgcggccccgcccccccggtggtagcggtggcggcagccggctcaagcccgggccgcagctgcctggccgcgggggccgccgagcagcgggagggcctttggggggcggggcggcggcgcccgaggacgacgatgaagacgacgacgaggagctgctggaagtgcgcctggtcgagaccccggggcgggagctgtggaggatggtcccggcgggacgggccgctcggggacaagcggagcgcgcccaagggccgtcgggcgagggggcggccgccgccgccgccgcctccccgacaccgtcggaggacgaggagccggaggaagaggaggaggaggcggcagcggctgaggaaggtgaagaggagacggtggcgtcgggggaggagtcgctgggctttctgtccaggctgccccctggcccggccggcctggactgcagcgccctggatcgcgacccggacctgcagcctccctcgggcacgtcgcacttcgagttcccggactactgcacccccgaggttaccgagatgatcgcgggggactggcgcccgtctagcatcgcagacctggttttcacctactgagcccaccgtcagcggggcgcgcacgcccccaaaccagctgtttacatacaggaatcaggtattggggcccctcggaggccgaggctggcaccccatctcccgcgcagcctgccccctcctggacgtgcccatcccccctcagatccagacatgcccctcccccgcagacacaccccaaggcagcccaacccccaccccttccccgacacccaagcccctccccacgtcgccccctcctgcacagccaccagcagccagccccctccgatacacctcccgtcctctcctacagacctgcacccctccccccttttgcacacgcccctcctcgtggccggaggacccgccccctcctttgctccggaatctctcctccctcgcccggcccgccttctctgggttaggggggcgatgcggccgggtggcaacgcacgcgcctcctgcgcccctcccttccctggggggaggggcgcaccccttttatccccggagcgctagggcccgcccctccgctggggcccacccccttcgtgcgcatgcttaatgcttctggggaggagggggctggtcccagcggagccgcactcttcgcccgctccgggcaaaagcgggggcgagtgtagagcgatcctgggaaatcctttgatccgggagccctaggtttcctctccagccaacggggcgtcgctgccttaatgggaggagcactcggaagggttggtttgggcctgaaactctcccaagtggcatagccccttttccggtatggggtctcctacacccacgcgcaccacctctccggtcgcgtggctgcctctacagcctacctatacgtccctttttccccccaactgggaattgagaggtaaggtctttctctggaaatccagcagtagaggaagggaccacccaagaaaactaaaaaccaaggcaccttaccagtctgtctggggacaggatccctgctgcaccttccccaccccctcctgggaagtgccccctcacctcagggcacccgcaacctgggctcctccctgagcgcaccggcccttcctgtcacccaggtccaccctcagtactcaagctgcagtatacagcgggaaaaactgaggcactttggtgctaggggtttgggactgaggcgtggagagcagatgtgatggcaggaagactctcgcttttaaacatctggtttgggagagaccatcgacttggccagtgagactgagaatggattccgagtagtgatgggccgtttgcacctcggtttttccacgtgagaaatggggagaacgctgctgttaggaggaagttgtgtccagttcagggtgccctcgggagccctgtccctgttgctgtggcccctctcacgccgccatctctctgccccgccccgcccctccggcctccccacaccccccttgccctcactacctgtatctcaccggcgtgtgttcaccctcccgggtggctcacacactctcattcacacacacaaatctcaggaacaaacggtcccagagtcctccggacccctgcccagggtctctgcaggtctctgccccacgcgttcccgtcgctgacaaagccaccagctgcctcctttaagcttggtgctccggctctgggcctttcttgcgctctattttttttttttttttttttaagaaaaacaacaacaacaaaaaaagacaatgaaaaaaaaaacgtcatgtgagtgaagagatgtcactgtctgtggtcttggagaactagtctcgtagctgaggggtggggtccctctgtctggggcactggcacccacagcaggactccgccagtctgatgccaggactgaataaagtgtatttgccccgaccttgccctgtggttctgcatgtctgtgctcttcctcaaccctccctaaacagtttgccagattcaagtccgtgtgatttgggcccgagctgggtgtcccagggcaagccaccttgcctgtctaggcctctatgtcaggactccctggccttcatgaagaatagcaaactcatccctgtagggaccaggcaggtaacatagacgagtgactctgggtggacagtggtgtcatgacccacttcaaggggcctacctcctgccagttgtgaccctgtgggaatgcagtccacagtggccaggtggccagatttttcaagaaaagctggatggatgtttctgagtcatcttaatttcaaaatgagactcatattttaaaatttctgtgggccaaatgaaacaagtatgcaggcaggtctggtccgagggggctggcttggccatgcctttctgtgcctttaatgaggactaagaagcaagattgggccacactgtctggactcaaagcccagctccaccactgagcacccgtgtgactctttccatatgtataacgtggggataataataatagctgcttcacaggatgaaatgaagtttgaggtgagaagcattcaccatggtgcccatcgtgttactccattgtcagaggaggaaacggggtcaggcaggaaagcaacttaaaggagggcctgcaagcagccagggtcagagacagggcttggttctgcttcctggtgaagcatggcttcggggtgctgcctctccctccctgtttgaatctgcagattgtgttaggcccccagctgagggcctggagtggtgggattggtcccagtgcctggcgcacattggcctgcagagtagattaactgaatgaccaaagagcaacagaagtctagtgattcttgtctttgaggttctgactggtgttttacaactgagtccaaggcttttccctcctttgtccctctgacacccctccccctaattctcatctgtcagatccagtgtattcctaagctgggacaaagcctctgttttcccagtaggagccagggctgagtgtggaaattacagtgactgcttcttctcagcttctctggttgaaagcaagctggcgaagtaagaggaggtagagttgagaaggtgtggaagatagggacagctgcccccagaactcccttcaagggaggacttccccagctatgggaagtgccatcagggtggccgcagctgcagagagccacttcacctgagaccacgcccttcctggggcagcctgtatctggtgtctgagtgaggcatggtataaacacctggtcatttcaatccaacatgggacggacactgacagacagtactcccagcaggcccaggccagccagggcttcgtcaggcctgcagcacaatttgacttcctatgcccaggcctgcttcctcttcttcctcttcttttcacaggtgcttattcctaataaacatcttgcaacccaaactcagtctcattgtctgtttctagagaaacccagtctacaacagagggttcaagagactggacaaagggaattgggtcagtggcccagcaactgcagctaggccggtcggatgtatcctaatgtcaagagtctgttcaccgatgccatcagcaccaaactaggggctgcacactttcctagtctgcacaccagtcacgtcaattagagactccagcctcagcccgaaggccttccagggccccctgctgatgccattctcactgccagtccgtcccctggtaaaagcaggtgggagggaggtcgtcatctgagtttgtcttacagaatagcctggaatggggtgcacggtaaaatgcctgaccggagataatgctagagctgtggaaccttgggcaagcctcttcccctttgtgggctgtactgggagtcggtaataggactagaagagggaccatctcattttggttccttccatttcagatgctgacctgaaaggtcggggagacagctccttatggggtctctggggccacctagtggctaagaggagtagaaccaaggttctgtgcagttgggaggtgggagtcggggtgtgtcccaggccaaggaactgagtcccactcgagtctcactccattcatgcattgactcattgctgggtcatgccccttgcctgggtggtgtgagccaccctgcttccaaggctttcaaaacaccatacgctgatgtattgtttctcatctattgctgcgtaacaaattgccacaagcttagcagtgtaaaacaacatgcatttgttatttcagtctccatgcatcaggagtccagcatgccttagctgggtctctgctcaggatctcacaaggcagcagctggggtgctggtggcccgcattccttcttggagctcagcagccttttccaagctctcacggtagtgggcagaattcagttctttgtgcttataggacagagatccctgttctattgctggctgtcagttagtaccactcttgattactacaagctgctcagtttcttgccacatggcccccacagggcctccccagccttctcacaatattgcaacttattttgtcaaggccagaggagaatttttctgctgcttggagtcacttggctcagggaaggtttaagctctcttttaaaagcctctcctggctgggcatggtgtgttcatgcctgtaatcccagcactttgggaggccaaggtgggtggatcacctgaggtcagcagttcgagaccagcctggccaaatggtgaaaccccttctctactaaaaatacaaaaattagcctggcgtggtggcagtcgcctgtaatcccagctacttgggaggctgaggcaggagaatcactcgaacctgggaggcggaggttgcagtgagccaagaccaagccactgcacttcagcctgggcgacagagcaagactctgtctcaaaaaaaaaaaaagaaaaaaaaggaaaaagagagagagaaaaaaaaagccttccctaattaggtcagactcacccaggaaaatctcctttttgattaggcatcaactaatgtgggattttatatctgcaaaaaatcccttcacctttgcagtatattgtagccttataagagtgacagctgtcatactagatttgcccacactcaaaagggaggaggctgtctagggcagctacaccagagactgggaatcttgggggccatcttagaattctgcttatcacacacctgtaatcccagcacttcgggaggccaaggtgggaggatttcttgagtccaggagttcaagaccaacctggccaacatagcaagacctaatctctagtaaagttttttttaaaaaaattagccaggcacggtggtacacacctgtagtctcagctacttgggaagctgaagtatcatagctgagaattctcaggtctacatctccatcccagacatgactagactagctgccttcttgtcatctccactgatatatctaattggcacctcaaactggacatgccaaaaaatgaactgtttccacagtgctcccaagcctgcttccacagaccacatctgcacagctgatgtgaaatgaaaggctaaagcctctcagttatccttgatgcctcttttcctcccagcgccatctcccttataccctgttggctctaccttcaaaatatgccctgtgtcttgtcacttctcacatcttccatggcctctgggtccaggatataagggcatacgaagggctccttgcgttttcctttgccccactcatagtcttattgtccacacagcagccggagtgatctggttaaactgtaaatcccagcacaccctgccactgttcaaaattctccaaagactctcattcagtagaagccagagtcctcagcatggcctgcaaagccccataagaagtagcctgtggctcagcctcggcttcatcttctactttttctgtttctcacatgcccagtcacactggtcttgctgttcctcaaaagtgccaatcacacttccgcctgaaggcttttgcacatgcttttccctctgcttaagatacccttcctccggctgggcgaggtggctcacgcttctaatcctagcactttgggaggtccaggtgggtggatcacctgaagtcaggagttcgagaccagcctggccaacatggcgaaaccccttctctactaaaaatacaaaattagctgggcgtggtgacacatgcctgcagtcccagttactcaggaggctgagacaggagaatcacttgaatccaggaagcagaggctgcagtgagctgagatcgcatcactgcactccagcctgggcaagacaaagcgagacttcacctcaaaaaacaaacaaaaaaatacccttcctccagatagccacatgtcttacttccttcaggtctcagctcccagggcgccctagagtaggcacagggagtacctcacagtgtcctccctgaccatccatataaagtaacatcctccataaactatcctgttactttgctttatttttctgaatagcatttatcactatctggcatttatcacctgtagtttttactttttgtctctctctctctaatttgtatgtaagcttcataaggaaggaatgactctggactggactccatgcctcagcacattcacccacccattcaacaaacattcttaagggtctaggctgggcatggtggctcatgcctgtaatcccagcactatgggaggccgaggtgggaggatcacttgaagccaggagtttgagaccagcctgggcaaggaaacaagaccctgcctctaaaaaatacaatttaaaaaagtatccaggcacagtggcgtgagcctatagtcccagctactcgggaggctgagctgggaagatctcttgtgcccaggagttcaaggctgcagtgagccatggtcatgccactacactccagcctgggtgacagagttagaccctgcctgtaaaaaaaaaaaggtggggggcagggtggggaaggtttgccttgaccaggccgcgtgctaggtgccgggcatacaaaagtgaaaaacgtgatttgtcctcagtgagctcacaggtctgaggagacacataaacccaggaatggaaatgctttgctggcgatggacagtgagtctgggagaacattgaggagatgtttaacccagacaatggagtggggtgtggtcaggtcattccctggaggaggtgatgtttaagctgtggcatgaaacctcagtaggatgtgatgaccttagaacatggctacacgttctttgacattcctcctttaaattaccttccctttgaatctgggctgggccttcatgatccatttgtaaccaacaggacacagcagacatggtgctgcaggatttccaaggctaagtcacgctgaaccgccatgttgaaaggccaacagccaagactgccatgtggagaagcagcccgggccacgtgggaagaccatgtgtaggtagctgctccagttgacagctgagcccaggcaccagacttatgagttgagaagcttccaggggattccagcccctcataattcaactcactcccagctgttggagggccttcccagcagaggcccagccatcacagagcagagacaagccatcccttctatatcctgtctgaattcctgacccagagtccacgaacataatgagatggcagttgtccacactattaggttttggggcagtttgttatgaaggaataactggaacaataggataaggaagagtgaggtgaaggaaaggactttacagatgccagcaacagtacatgggaagacctggtaagagtggctgacacagaagctaaccagcttgcggggaaggtgtggagagaggagggtgacaggcaagagtgagaaggaccttgaaggtatttggactttatcccgagtcttcacactgcagcccaaggggtcaaggagtctttttttttgtatggtaaacatggggtcttgctatgttgcccaggctggtcacaaactcctggcctccagagatcctcctgccttggcctcctaaagtgctgaaattacaggtgtgagacactgtgcccagcctccaaggggtcttctcttttttttgagaccgcgtctcgctctattgcccaggctggagtgcaatggcgcaatctcagctcactgcaatctccgcctcctaggttcaagcgattctcctgcctcagcctcctgagtagctgggactacaggcatatgccaccacacctggataatttttgtatttttagtagagacagggttttaccatgttggtcaggctggtcttgaactccttacctcatatgatctgcccacctcatcctcccaaagtgctgggattacaggcgtgagccaccatgcccagccggggtcctttgaaaacacaaacctgaccactgctgtaaacctttcgatggccccttactaccctcaggataaactcttgaaattcaaggcattttgcagttgactccctcactcttttatagatttatcttcggtcactttatcctcagctacgccaggccactctccagtgacaatgcttcccgcctcacccatgctatttatctttgctcatgtggaggaattagtgggactttgggctaatcaccttgcctttcgaggcctcagtttccccatctgtatgattaggtggttggactagaagtttttgttttgttttgtttttgtttttgtttttttgagaccgagtttcactctgtcgcccaggctggagtgcagtgctgtgatctcggctcactgcaacctctgcctcccgggttcaagtgatttttctgcctcagcctcccaagtgactgggattacaggcatgcaccaccaggcccaggtaatttttttgcatttttagtagaaacagggtttcaccatgttggccaggctggtcttgaactcctgacctcaagtgatccacctgcctcggcctctcaaagtgctgggattacaggtgtgagccacgacacccagccttagatgtctcttaagagcatatctagcctggcattctaggagtctatgaaaaggagggagaaaggtgtctgtagccaaacctgcctgtctggcttcttctaggttgcctagcaatggatgccaaccctctcccccatccttgggggtttcttagcaacccagtttctcaccctctgctgttttcagggtttccttttaactaaatgtcaagttttgctctttctcctccagaaaacctgaggccaagggtctctgtgtagagctggatacaacccagaatacacagagacctgggtttgaggtcagtggaggatttgctgtgtgacttggaggtctttgacctctctggctttcatttcagactgtgattccctgtcatatgctcctcagagttcttcttcttttcttcttcttcttctttcctcttcttcttcttcttcttcttcttcttcttcttcttcttcttcttcttcttcttcttcttcttctcttcttctttcttcttcttcttctttcttttcttcttcttcctcttcctcttcttcttcttcttcttctcctcctcctcctcctcctcctcctcctccttctccttccttctttcttcttcttcttcttcttttgttttttgagacctagtctcactctgtcgcccaggctggagtgcagtggggcgatcccggctcactgcaacctccgcctccctggtacaagcagttctcctgcctcagcctcccaagtagctgggattacaggtgcacgccaccatgcccagctaattttgtatttttagtagacacagggtttcactatgttagccaggctgatctcgaactcccaaactttgggattacaagcatgagccactgtgcccagcctgttcttttctattttttgagatggagtctcactctgtcacttaggctggagtacagtggcacaatctcagctcactgcaacatccacctcccaagttcaaacgatttttctgcctcagccaccaaagtaagctgggattataggtgaacaccaccacaccgggctaattttttgtattatttggtagagacgggttttcaccgtgttacccaggctggtctcagactcctgacctcaagtgatccgccagcatcagcctcccaaagtgctgggattacaggcatgagccactgtgcccagccctctgtattgttctgattttagtatatgtgtgctgaaatgagcacttccctcttctcttgtatgcgtttggtttgactaccaaatttattcacttttgcaataaaccgtcactgagcacctactatgttccaggcactgtcttaaggactggggattcgtcagtgaataaagcagacatagtcccttccctcacagagcttatactctagtagatggaaacgtataatgaataaacagataagtgcacataatgatatcatgcagtgaaggggacaaagtgtaaggaagggctactattttagatgaggaggttgtatcagtcaagatgggctagggaagtcagagatggttgggaagaaaaagcctggcttccccctttctccctccaacttcctgtgggtgcctcaccttgggtgacctcagctagaggccagctgacaaaggaggctgagtagcttccaggggtcagctctgcaaagcaggaaagagcaaggaatccactggaagcaagaaggcccaaaagtaccttgggaggtacgccgctttttcagctcactcactgcctgtaaactgtcagggaccctaggatcattaaaaaatattttgagggccgggcgtggtggctcacgcctgtaatcccagcactttgggaggctgaggtgggtggatcacttgaggtcgggagatcgagaccagcctgaccaacatggagaaaccccatctctactaaaaatacaaaattagccaggcgtggtggtgtgtgcctgtaatcccagctactcgggaggctgaggcaggagaatcacttgaacccaggagacagaggttgcagtgagctgagatcacaccattgcactccaccctgggcaacaggagcgaaactctgtctctctctctctctctctctctatctatatatatatagatagagagagagagagagagtagtaaaatacagatagcataacatttaccatcttaaccatctttaggtgtacaactcactggatattaagtatagtcacattgttgtgcaaccatcaccatcatccatcttgagaactcttcatcgtgcaaaactgaagttctggatccactatgcactaactctccatttccccctccccctagctcttagcaaccaccattctgctttctatatgtatgaatttgactatggtatatgtctcatataagcagaatcatacagtgtttacttttcgtgactggtctatttcacttcacatcatgtcctcaaggtttatccattgcagcatgtatcagaatttccttctttttaaagctgagtaatattctattgcatgtgtatatcacatcttgcttatccattcatctgttgatagacacttgggttgcttccaccttttagctattgagaataatgttgctatgaaaatgggtttggaaatttctcttcaagatacactgctttcagttcttttttttttctctctgagacagtctcactctattgcccaggctggagtgcagtggcacaatctccgctcactgcaacctccacttcctgggtccaagcaattctcctgcctcagcctcccgagtagctgggattacaggctcacaccaccgcacctgatgtgtgtgtgtgtgtgtgtgtgtgtgtgtgtgtgtgtctgtgtgtgtttagtagggatgaggctttgccatgtttgtcaggctgctctcaaattcctgatctcaggtgatccgcctgcctttgcctcccaaagtgctgggattacaggagtgagccaccacccctggcttcagttctttggggtatataactagaagtaaaattgccagatcatgtggtaattctatttttactttttcaaggaatcactatgtgttttccatagcatctgcaccatttttcattgttatcaacaattcacagggttccagtttccccctatccttgccaaaacttgttattctgttttgttttatggtagtcatcctaatgggtatgaagtgactaggatcattttgagacccaaacagtcacaggcttttttgttgttgttgcccaggctggagtgcagtggtgcaatcatagttgaccgcagcctcaacctccttgggctcaggtgaacctcccacctcaggctcccaaggagctgggactacaggcacacaccaccacatccagctaatttttgtgtattttgtagagacagggttttgccatgttgaccaggctagtcttgaattcctgggctcaagcaatccacctgcctccagcctcccaaagtgctaggattataggcacccagcttcataggctttttagcccaggcttgtgatttctttgtcagtataattctctgaaaaacttaggtttctggcagggggcagtggctcacgcctgtaatcccagcactttgggaggccgaggcggacggatcacctaaggttagaagttcgacaccagcctgaccaacagggtgaaaccccatctctaccaaatacaaaaaattagccaggcatggtagcatatgcctgtaatcccagctacttgggaggcggaagcaggagaatcacttgaacccaggaggtggaggttgcagtgagccaagattgtgccattgcactctagcctgggcaacaagagtgaaactccatctcaaaaaaaatcttaggtttcttatcgatttgactgtagttaatggtactaaaaccatacccacaatacttttcaatatattgtcctcaagtctgctttttccctttgctttctatcctaaagctgtcactctcaatgtaatggcaattagcaagaataacaggtggcagagttgcacctctaaagtgatcttggctctgagagtttttacaggacatttttcactcaaagccttttaaaaatccaatctcatactttagttgattctagccttgaagtactttaattgataaaaaagaaagttcataaggtcattgggaagattaattatcccagcatatagtaaatgctctataaatgatacccatctttgtcacttttttttttttttttgagacggagtctcactctgtcgccaggctggagtggcacaatcttgtattactgcaacctccgcctcctgggttcaagcaattctcctgcctcagcctcccaagcgagtagctgggactacaggcagcatgctgccactcccggctaattttttttttttttttttttcagtagagctggggtttcaccatattttctttctttctttctttcttttctttctttctttctttctctttcttttcttttcttttctttttctttctttcttttcttctcagagtctctctctgtcacccaggctggagtgcagtggcatgatcttggctcactgcaacctctacttcaagtgattctcctgcctcagcctcaagagtagctgggactacaggcatgtaccaccatgtccagataatttttgtatttttagtagagacagagtttcaccacgttggccaggctggtctcaaactcctgacctcaagtgatccacccacctcagcctcccaaagtgctgggatcacaggtgtgagccaccatgcctggacaaattttcctatttcttaatagataatccatcttgtttttctcaaaagtagacagtttatcaggtgtcgtgtctctcaccttcccaccctactcacctataaactaatataacaataacagtaacaataaccataatttgctgagttctaattttgttccaggtactttggataagtgtcttatatgcacatctcatttcactctttcaacccctctgagaggcaagtacttaaattatcttcattttacagtcagggaaactgaggcacagagtgtttaaatcatgtaagcagtaagtagtggagctaagattcaaacgcagatctgctggactccagagttcaacttacagacactacattgtggctcttcttggtggccccctcccctcctccccaggctctcagaggatacaggatccctcctttgctagtcaaggccagcccatccccctgtatatttgacttcatctcttcccactgccccaggatttcatccacccctgctctgatatcaggggccccctccccttctgtccatggtgtggggctttttgcacttcacacacacacacacacaggtgcacatacatacacaccccttctccaaaccactccacaaagggcccctgcctcctcactttcttgccttccacatcacaccctaaattctcctggccaaggttcccactgacctccttgttgccaaacctaagtcctgttgtcccgctgtgtgtctcttatgcacttggcaaggctgagcaggtccttcttggaaatgtgtttctttggtttctatgacacaatgcacccccactccaaaacacacatacacacatcccagattcttgcccccacccaccaccacccgctatctctctagatgcttctgtggttctttctcctcctctgacctcttcaaatgtagtatggtggttttaaaacatgtccataatttttttttttttttttgagatagagtctcactttgttgcccgagctggatacagtggtgcgatcaggtgcgtgccaccatgctcagctaattttttttaacttttaagttttttggagagataggggctccctgtgttgaccaagctggtctcgagctcctgggctcaagcgatcctcccatcttggcctcccaaagtgctaggattacagacttcagccatcgtgcccaaccatgtctataaattctttaagactcctcccactgagtaacagagtctgtttcttccccttgaatctgagccaaacttagtgactcagactacagtagaaatgattctatggtgacttgtgaggctgggtcataaaggcaatgtggcctgactcatgggagtcctgagctacagtgtaagaggtgtcaacactctcagctgccatgctgtgaggaagcccaactggctcatgcagagagacaacatggagaggccttgaggctatatgaagagagatgcttggccagctcccagctgctccagctccccagtgctccggcttccactgtaaccacaaaagagacaccaaggcagaaccacccagatgagcccttcccaaattcctgacccacagaaattgtgaaagatgataaaaatcattggatttggagtggtctgttatgcagccatagacagccaaacagaggcatcttaatctgcttgggctactataacaatttagcatggagcaggtggcttgacaacacacatttattcctcaggtctgcagggtgaagagtctaagatcaaggtgctggcaaattccattctgctggcaaccaagggcctgacttctggtgtacagacgaccatcctattgtagccccaaatggcacagagaagaagcaagctctcaagtctcctcttatcaggctgtaatccctcccaaaggcccacttccaaataacatcaccttaggacttcaacatatgaatatgagggagatacaaacattcagtctgcagcagagggcttcgttagagctctgacctgagcacgcttcatctcaatgtcattgtttttgccagctctacatccactgccctttttttttttttttttttttttttttttttttgagacagagtctcactcttatcacccaggctacggtgcagtggcacgatcttggctcactgcaacctccgcctcccagcttcaagtgattctcctgcctcagcctccggagtagctgggactacaggtgcatgccaccacacccggctgatttttgtatttttagtagagacagggtttcaccatgttggtcaggctggtctcaaactcctgaccttgtgatccacctgcctcagcctcccaaagtgctgggattacaggcatgagccactgggcctggccccactgccctttcttacagtaacagtatttcaatttccctttagggaagctcttcaagcaggttctcagtccaagaggtttctctgggttaagcactgccagccacccaaagggtgagcaagtaaccagccaatcagagacactccagtgggttcagtaaatgacatattatctaactggggtgaggggaatcaacatcagggcttttcctgagactataaggagaaacagattcttttcccagcagttaaatttgaagtctgtggccattttgctaccatatagggaaaatctgcctgacattgaagccaacacagatgagggaagagccaagagataaagagaaagatcctgagcatctggatacagccatgcctgaagccagtatcccttgacttctcaattatgtgagcctttatattccctttgtttaaagccagttcaagtttaaaactgccatttccagtgagaacaattccctatgttgtatctaaggccaagaccttgcccctgactctaggccagaatgtcctgtacagtgccattcaactctgccaaaagcaaagggcatcaacttctccacaacctggctttccctcatctattttacatctctgttaatgggagcatcacccacctgacctataaacataaaagtcagcctctatcctctctgtctctctccctctctctgtctctctctctctctctcaatccctgtcacttcccttacttcttagtaaccaagttctgccaacttaactttatggacatttttcacacctgcaccctcctttccatttttcctgcccactccaattcttcatcatttctcacctaaatttttacaaaatcaatagataactaacatagaggtgtatagtaaaaagtgaatttcggccgggcacagtggctcatgcctgtaatcccagcactttgggaggccgaggcaggcagatcatgaggtcaggagatagagaccatcctggccaacatggtgaaacctcatctgtactaaaaatacaaaaaaaaattagctgggcatggtggcatgtgcttgtagtcccagctactggggaggctgaggcaggagaatcgcttgaacccgggaggcggaggttgcagtgagctgagatcgcaccactgccctccagcctggtgacagagcgagactccatctcaaaaaaaaaaaaaaaaagtgaatttcattcccacccttgccatcagttaccctcccccaaggcatctactgttacctctttcttgtctattttcccagaagttctctatatgtgccatctttttgagaatttcaaatggaggcatactatcaagacttttcagaacactgcatccttcttcacttgaagtgtgattaatataaataattatagactaatttcttctttctaatggatgcatagtattccacaaagacatataatgtacataactcgtcttccattgatggatatttaagtggtgtcccagttatctgttagcacagaacaaaaccccccaaacctagtggtataacacaataaccacttgaatatgcttgtgggttctgtgtgtcaggaattcaggcaggacacagtgaggccagcttgtttctactctgcaatgtttgagtcttcagctaggaagatttgaagatttgaaggctgaagctgattcaaatggctggccactggaatcatcttgttcttccccttccccttcgccttctacagtgcaatggcatgatgtcggctcactgcaacctctgcctcccgggttcaagcaattctcctgcctcatcctccctagtagctgggattacaggtgcacgccaccatgcccggctatttttgtatttttagtagagacggggttttgccatgtggccaggctggtctcgaactcctgaactcagggtatccacccgccttggcctcccaaagtgctgggattacaggtgtgagccaccgtgcctggcctcatctggttcttcttcactcacttcttttatgcttgaactgggatgactcaaagctaagcttagctgggactgtggtgccttcatgtgtcctctcctgatggtcttggcatcctgacagcatggcagcctctaagcagacatggagccctaggtaggcatggtgcctcaggctccaagagctagagttctagcagaagttgcctgtacttttatgtctggaccttagaagtcagagtgttacttccaccgtactccattggttgaagcagtcatcagctcacccaagattcagagagggtacaaggatcccacctctctacagaggagtgctaaagaatttgtagctatattttaaaaccaccacaggttgtttccaatctgtagctattcctgtagttcattttacaggctaacatctcttgaatgtcttcatttctctgcaccaggccaagacactgtcatctctgatctctttgctgatctcttgctgtcactcttgtgctcaacatgctgttctcttgacagcagccagaggtcttttcagaatgaaaatcagatcacatcccacccctcttcataacccttccatggctccccactacccttgggctgaagctcaaactccttaccttggcttatgaggccccacaaggtctcacttctgcctgcctctccaatgccatctcctgtcaccatttggggcctttagttttgagctgcaagagttcctcccatcacacacacacacatacacacacacacacacacttaaatgagtaagtaaatagaacatacaaaacgcttaaacactttgcacatagtgagcataataagtttgctactattattagactgtcttcagtaaatatttactgggctgcctactcagtgccaagcactatgggaggctcacagatacaacacgaacaagaaatatgtggccttggccagacgcggtggctcacgcttacaatcccagcactttgggaggccgaggcaggtggatcacttgagctcaggagttcaagaccagcctgggcatcatggcaaaaccctgtctctattaaaaatacaaaaaattagctaggcatggtagtgcgtgcctgtagtcccagctcctcaggcgactgaggtgggaggatcacctgagccttgggagatcgaggctgcagtgagccgtgatcatgccaccgcactccagcctggacaacagagtgagacgctgtctcaaaaaaataaaaattaaaaaaaaagaaaaagaaaaactaaaaaggaagatgtggccctatcttgccgagctcattcttctgtgtgtccccagcccctagcacaaggagaaacagaatagatgctcaagacacaaaggcatgtctgtgcaagggtgcttgatgacggttggaggggcacaatgactttcccaagatcacacagcaaatgtgggacaaaatcaaggctgacagctcatgacagggtgggaggcagatgcagctgcctggcacaggctggctctccagggagatgggcagtgggcacgcattgcccagggcagaactggggctaggggaggaaacaacaagggaggctgtcattagctccttccaaagtggaggtcacttctctcccaaccccgagtcctccacccaaactcccttctcaaggtacaagggctgatcccgtaccagggatgggtagggactcaaagaggaaaagaggatgaaaagaggatggggactgagtgagatgtgaggactccagagggattagcggctctcaaggcaagtgggaggggacttcccggtaggagcccggagacagatgggagcctgtgaagagggcgggggcccggcgaggagaagcggtttctacgctggggtggggctccatgagggggatggagacctggaaaagggactgacggtgcagcgaggagaggaaggctcggttaagggatgggtcttccacgggaggggtggggaactgcgggagtgacggcagcttcggtgaggagtctgaggggctgcgtgaggggctggggcccagggagtccgaggggtctctgtgagggcgctggggtgtccgagcgagcagggaactctggaaggggacaggagccgggggagctgcaggcggccgccgtctgcagagccaggccctgaggcgggccggcgccccctcccccgccccgaactgcggcgcaggcgcgaaccggacccgcctttgctcggcggagacagcaggcagagaggtgagcttagccctgccccacgcgcggccaggccccagccccagcccctggagaacccccgcgctctgcccgcatcctcagcccgggccgtgtcccgccagggccgggacctttgcgcctgagcctcggctttgggaggtgggggtcccagggaagcagcaggggcgggagacagaaacagccccatcgcccctcgacgcctcagggttgataggctgggtagaggcttcaaaggacacccccacccccgccaacacttcaaaaacccattcctacccctctctgcctcagtttctctctagggaaaaggacgcagttggtgtggagcagggcatcggtggtcctgtcaggaagagtggcgcgggtgccggtggggaagggaggcgggaaatggcctgatttccccggccgacaccccctacccatcccccccgggagggcgccccttctcccccgcccgggcagcgctggacgctgtagtgggcgagtctgagggtctgggaaggacacaactgaatgaggctgtgcagaggcgacagattccgtccatcttcgggccctggcttccgtcacttccgcccgtgcctgccgcccctcgcctcctccctccgccgcagtctccccacgtcggacagcgcagccccctccgcctcccgctcccctcccaccgagctcctcccggctcccgggctggggacgcctccctagcggttcccatggcaaccctcgtcccgggtgcctgcgccccgccccccgcccgccagacctactccgtgcagccctgaaacgccaggcggaggggccaggccgagcgggaggcagcgtcaaggtcaccttccctctccagtagcagcaggactgagtgattccatctatttggagtcgcggaagcggtgaattggaggggaggagctgacccaggtcaacagccccgaagccccctccacacctcctcacctgtggccttgaacagtggtctccgcacggaggctcctaccgtcccccaggccccatttcttctccccacccgggcctccccagcgcctcgccggggcgggtaccgcgctggccgcaccctccgcacagcccgccccgcccgcctcctccggcgagccctcctctccagacctctcgccctcctcctccgacggtccttcgctttcagtctctgccttttcccgttctctgtcgtggcttttgttgttgttgtttttcctcctttccttccccgctcttcttttccctgaattgtaagtgaggagggtgtacagccactatttatggacaggctttcttgacagcaatcttgtgtgccgtgtgactccaagcagaacctccaaccgtgtgtgtgtgtgtgtgtgtgtgtgtgtgtgtgtgtgtgtgtgtcgtacctatctgggtatgtctctgtatgctttgtgagtatgtctgtgtgtttctctgtgctgtttcggtgagtttctctatgcagggatttgaggaccacatctgattggaagtgaggggcagctgtcaggacctttatcttaccctttggaacaagcacattgtttcattttgcaggaggctgctaattaaggctgagggccatcatggagactggggtagaagcccagtcctcccccaacacctcctggctttggttcgggccaaacctgtatatggatatacaagtaccttccattcccaagatccgtgtccacttttgtggaaaaaaaaaaaaaggttatttgataggtttctctggaaatctaacagcccttaagcctaagagtctttaatcctgagggaccctgactttcacttccaatggagtcaaaattcattggaatctggaggctttcaggggcagtcctggggaggacctttttatagccttgcagcttgggaactccagcccaagtgtcagccatgacaattacccccaggagggggtctgaaggggagcggagggtgaggctctctcattccagatatggagactaaaaagttcaagatggaagtaatagcaaaaaaattacagtactaatcacaacagctaccatttctcagcattagacacagtaactgtatgaaagaagtatgattattaggtctgttttacagatgaggaaactgagacccagaaaggtggaagcacttgtctaaggtcacgcctccaggaagcagtgtgtccacgactccagtccaagtggtcaggctccagagcccacagtcccaggtactgggtggcctccagagtaaacatgcacatttattgacacctccaattgccaggcactgggctaaggccttcagtgcattggctcattcgcagtgtgctttgggaaggacaggctgggattccaaaaggccagactgtgctatgcgtgtagggtgtctcgagtgggaggagaagcgggtggggcacaaagatttagggggcttatgaaggtcaccatgagcagctcccactaatccctccctccgtcagctgcaccttacctgctccccaggggtccatgatgccgagctgcaatcgttcctgcagctgcagccgcggccccagcgtggaggatggcaagtggtatggggtccgctcctacctgcacctcttctatgaggactgtgcaggcactgctctcagcgacgaccctgagggacctccggtcctgtgcccccgccggccctggccctcactgtgttggaaggtaaggccagatgagcacctcccatgattcctctgccttgatggaggaaatgagtctgaatttgaggctcagaggaaaaaagaagagatagcgtagtagttaggagtcttgcacagtcaagcaacagaaaacccaattcaaatgggtttaaataatgaagggagccttcattgtatttgtatttacatacaaattatttacataattatttacatatttattgtatgtaaataatggtggctcatgcctgtaatcccagcactttgggaggctgaggtgggcagatcacctgaggtctggagttcaacacctgctctgtcagcatggcgaaaccctttctctactaaaaatacaaaaatggaccgggtgcggtagttcacgcctgtaatcccagcactttggtaggcggaggctgaggctggtggatctcgaggtcaggagttggagaccagcctggccaacatagtgaaaccctgtctgtactaaaaatacaaaaattagctgggtgtggtggcgggcgcctgtaatcccggctactcgggaggctgaggcaggagaatcacttgaaaccaaaaggtggaggttgcagtgagctgagatcaatccattgcactccagcctgggtgaaagagcgaaactccctctaaaaaaaaaaaaaaaaaaaaatgagccgggcgtggtggcaggcgcctgtaatcccagttacttaggaggctgaggcaggagaattgcttgaacccaggaggcagaggttgcagtgagccaagtttgcaccattgcactccagctgggcgacagaacaagactctgtctcaaaaaaaaaaaaaaaaaaaaaaaaaaaaaagaaaaaagaagggaaaatgttgctcattttttagaagagacccaaggtccaaggttgcatactttcaggcaaagtttgatccagcagttcaaccctttataccaaggactttgcaagttttcttagtcttcagcctcctcatggtgcccctaccctggtagcctgttagcttcagactctccccacatgttccccaaatggccactactgtgtggactctcaggtcttcactccacaccatctaagggaagtcagcatttcctgtggtatttccttcagaaaagaaaatagcctgtaatcccatcattttgggaggccaaggtgggtggatcacctgaggtcaggagttcgagaccagcttagccaacgtggtgaaacctcatctctactagaaatacaaaaattagctgggtgtggtgatgggcgcctataatcccagctactctggaggctgaggcaggataatcactagaacccgggagacagcagttgcagtgagcagagatcgtgccgttgcactccagcctgcacaacaagagtgaaactctgtcttaaaaaaacaaacaaacaaaaaatggccacaggtactggcttacacctgtaatcccagcactttgagaggctgaagcaggaggattgcttgagcccaggaattcaagatcagcctgggcaacatagtgagacttcatctctactaaaaataaaaaattagctggatgtagtggcgcgggcctgtgatgcctactactcaagaggctgagccaggaggatcgtttgagcccaggaggttgaagctgcagtgagccatgattgtgccactgcactccagcctgggcaacagagtgagactctgtcaagaaaagaaaagagagaagaaaggaagagagaaagcaaaatagtaagatattaaaaacatgttaccatttaccttagcaccaaagaagagagaaatacttaggtgtaaatctaacaaaatatctgtaatatgagaagaactacaaaactcaaaagatatcaaataactaaataaatggagaaatagttcatattcgtggattggaatagtcaagatgttagttcttcccaacctgatctttgattcaatgcaatgccaatcaaaaccccagcacgttattttgtggacgtcaaaatgtcacctcctcagggaggagatccctggactgagtcgggtcccttgctttactctgggcaaactctgtgcccattcattcttcaatacacttaccactttgcacacttgtagtttatatggagaggtaaaagattcagaaatttaaaaatcatttataagaaacaatgcttttaattcccagaagtcctgacaagcattgtgttggctctcattgggtcacttgccagccttgaactaattactatggttaagagatggactatgctgactggcaggaagtgaggttcatctcacttaaatcttactgtggtttctcaatggtagactggagtaccttgccagggcagagaaaaaatgtgaagaattgatgtctttaacagccaaggagactagtcggccagggtgcaccaatgggtcaaggtgtagaggtggcaatgagctgagtgcctgctatgggcatagctctttgctaaatattctcgggagactgaggcagagggtcccttcttttgctttcaaaggacttcactctagtgaggaggtaaggtgccaacctctgcagagaggccaacttacataacttcaggtcaggtctgtagggaacaccaggagaggaaatgatcaaggaagacttccaaggaaaggttagtgtgtatttaaaatttttaagcatcttcttattgcgaggcactgtgctaggctcttgggaacacagaatttaagacatgaggtccctgtcttcgaggaactcttttagctgtggtttatttaatcattcagcaaacatttattcagcctttgctctgtgccggcacgtgctaggcacagaagactcctagtgagccaaaacaggcacagtctgctctcatggagctctcagtactgcgggagaggcagacgtcacttacatagcaaccaaaatacatgtccaagtgtgcacaatggtaagtgtattgaagaatgaatgggcacagtttgcccagagtaaagcaagagacctgactcagtccaggggtcttctccctgaggaggtgaggtttgagatgagatctgatggtgcataggagttaacccaacagagacaggaaggtagaaaggataaagagatgagttgggatggagggaaacacagggttggccggagaaacccactgctaggtgggagctgggaaggaaattaagaggcctcaggattccaaataaaacatgacagtttatgcctcctgtcagttagaccccagcaagtgtgttctgtgattcccatctcctgaggatggatcaaggggttacccttaagtctggtgaggatccaaggtgatcccttggccaggggcccctggctgaccctgactgcttcctggtctgtctgcttctccctagatcagcctgtcctcggggaccctgcttctgctgctgggtgtggcggctctgaccactggctatgcagtgccccccaagctggagggcatcggtgagggtgagttcctggtgttggatcagcgggcagccgactacaaccaggccctgggcacctgtcgcctggcaggcacagcgctctgtgtggcagctggagttctgctcgccatctgcctcttctgggccatgataggctggctgagccaggacaccaaggcagagcccttggaccccgaagccgacagccacgtggaggtcttcggggatgagccagagcagcagttgtcacccattttccgcaatgccagtggccagtcatggttctcgccacccgccagcccctttgggcaatcttctgtgcagactatccagcccaagagggactcctgagctgcccacatggcctaagatgtgggtcctggatccttccccccttctcaccataaccccctctcagtgtttccccaacttctcccttttagcagggtccctttagagcccaactccaggtcaaatctggagctcaaatcccagtgctccctccccaggagtggggccccaactcttccaagataccagcattcctcaagtcctcccaaaacttcctacccacaccctcttcccaaggccctcaggggcagaaaacatctccttcaacccgtccccactccttcctctgcatgaccttgggcaaacccttgccctttcaagccatcagctcctgcctctctgccatgagggctttggatcagattcctcttctcgccaggatgaggacacgcactgccctccatagacacagatgaaggggtgggggtcattcagctcgaatgggtcccagatgctcacttggcctttccctgcaggatgagtgaagacgtttgcctctcacagtgtgtcttctacctgcattttggcatcagagccccccagcccacccaccacaggcaattactagccctagttgataggtgaggtgggtgaagaaggctggaggtgacatgtccgaggtcacacaacaaagcagcatgcaggaactagaaacacatcttcagcctcctcctgggccagctcttgtgctacaggtggggcggagccagcccctcaccttcctggttccctgagggtcctcagggtggaggacaggtttggcccagaaagactagccagaggcctgatggtcccaggtggctctggatatactttggatatggatttaaatggtctctaagagccgggggtagggggcaggaaaagtgggttgtctttgcccctcaaagtccacctacctagaaaccaagcccacggtcttggccgtgaccctgataataaatgggctctctcagaggcgccagcccctccctccccagccggaggcgtcatctctcttctgtaccactagagggagctctgatgcagctggagagcagcgctcaaggctctcgcccctcccctccctaacccttaccttcagtctccaccagcctgaagggcctcctaggggatcctcaggcggcccccaccagggcacaccctactgtccttgtgcctcacgccccctcctcatcctgcaccccttccatcccaccttccctttcaataaacagctgggatggatactgactttgtttcctttctccctggccactggggcgtggggaggagaaagacacagactcaggagcacctactgtgtgctgggcacgacccattatttctcattcgctcctcaggataacctgttgagaaaggaattattgtcttcttttttttttttttaagatgttgtctcgctctgtcgcccaggctggaatgcagtggggcgatcttggctcactgcaacctctgcctcctgggttcaaccaattctcctgcctcagcctcccaagtagctgatattacaggtgcacgccaccacgcctggctaatttttgtatttatagtggagacggggttttaccatgttggccaggctggtcttgaactcctgacctcaaatgatccgcctgcctcggcctcccaaagtgctgggattaccgggtgagccaccttacccagacttattgtcttcattttacagatgcggtaactgatgatcagagaggtgagtgatttattttttatttttatttttaattcttttttatttttttcgagacggagtctggctctgtcacccaggctggagtgcagtggcacgagctcagctcactgcaagctccgcctcccgggttcatgccagtctcctgcctcagcctcccaagtagctgggactatgagtagctgggactacaggtgcctgccaacacacccagctaattttttgtatttttagtagagacagagtttcaccatgttagccagcatggtctcaaatctcctgacctcgtgatccgcccgcctcggcctcccaaagtgctgggattacaggcgtgagccaccgcgcccggcctatttttaattctttttatttcagtagcctttggggtcaaagtgggttttggttacatgaattagttctatagtgattctgagattttagtacacctatcacctgagcagtgtatactgtacccaatacgcagttttttatccctcatcccctcccaacctccctggactcagtccccaaagttcgttatatcactctgtatgcctatgcatcctcatagcttagcttccgcttatataagtgagaacctaccgtatctggatttccgttcctgagttacttcacttaggataatggcctccagctccacccaagtcctgcagtggatttaaatgctcagcctagggcctggaggggtggctgggccaggcgaggtggctcacgcctgtaatcccaggactttgggaggccgaggtgggtggatcacctgaggtcaggagttcaagaccagcctggccaacatggtaaaaccccataactactaaaaatacaaaaattagctgagcatggtggtgcatgcctgtaatcccagctactcgggagactgaggcaggagaattgcttgaacccgggtggtggaggttgcagtgaaccaagttcacaccattgcactccagcctgggcaacagagcaagcctctgtctcaaaaaaaaaaaaaaaaagtgcttagcctgattggcctattgcctgagtgtggagctcctgtctttgggtgggaaggagatttctcagccaccttgagaacacacttcctctagttctgaaaggaatgtgagggccagggtgtgggagagggggctgaagccaaaggtaagatcttttccaggcctggaagagtaattaaccccttttggcactcaccaggggctgggccttgttcttagtgccttacagaattcgggaattcatttaaccaggacgacaacctctgaggtggcggctattattctcaaacctagtttttcctaaactccaggcttgcgttcccatctgcattcacctggatgttgaatttaaactcaactatctcaaactgttctccttgttaccacccctccctgaccaaacctgcctctactatgctgcccacgtcttagagagtagcgtccccattcttctggctgctccagccaaaacctcctctctttcctcacaccctgtatccaatccatcagcaagtcctgtcaactcaaccttggaaatatatcctgtacccaactacacctcgacatccccgtggctgattccatggtctgaaccaccagcgaccagcgcctcgatctggatcattgcaccagcttcccccggtctcctggcttctgagttttgaaccccaccctactccacgccttgactccccaagtctaattactacacagtagccagacagatcttgttagaacataaactaggtcatgttcctcctccgctccaaaccttcccatggctcccacctaactcagagtagccaaaaccctccctgtggcctccaaggccctacacaatttgctgatttccactccccccgcactttcctctgtaaccccaactcccaccactctccaggttcctgtgtcctctccagccaggatcctgactcagggcctttgcctcactgttccctctgctggggtactcctccccagttgacgacatgggcagttccttcaagtcgttgctcaaacatcaccttctcagcaaggccttccctgagcagcctattagaattgcaaccaggccaggcgcagtggctcaagccagtaatcccagcactttgggaggccgaagcaggtggatctcctaaggttgggagttcgagaccagcctgaccaacatggagaaaccccgtctctactaaaaatacaaaatcacccaggcatggtggcacatgcctgtaatcccagctactcgggaggctgaggcaggagaatcacttgaacctgggaggcggagattgtggtgagctgagatcgcaccattgcactccagcctgggcaacaagagcgaaaccccatctcaaaaacaggaaaaacaaaaaacaaaaaaatgcaaccatgccggccaggtggagtggctcacacctgtaatcccagcactttgggaggccaacgtgggcagatcacctgaggtcaggagttggagaccagcctgggcaacatggtgaaaccctatctctactgaaaatacaaaaattacccaggcatggtggcacgtgtctgtaatcccagctacttgagaggctgaggcatgacaatcacttgaactcgggaggtggaggttgcagtgagccaagatcgcgccattgcattccagcttgggcgacagagcgaaactccatctcaaaaaaataaaaggaagctaacacagagtataaatggtgcaggcagtttgacaatatcaaaatagaaaatacacatgccctttgatttctccctcttatgcaggtggatctatagattcaactctacatgttggaacactatagtattatttgtaattaaagcatttggaaacaacctaaatgctcatggtaggggactattaataaaatacggtaaggctgagtgcagtggctcacgcctgtcatcccagtactttgggaggccaacgcaggaggatcacttgaggccaggagttcaagaccaacctgggcaacatagggcaacatagcaaggccccatctctacaaaaaattaaaaattagctgggcatggtggcacacgcctgtagtctcagctattaatatttgggaggctgaggcaggaggatcacaccactgcactttagcctgaatactgagtaacaaagcaaaaccctgtctctcttaaaaaaaaaattggggggaaggacaagtcttttttcttttcttttcttttcttttctttttttttttttttttgagatggaatttcactcttgttgcccaggctggagtgcaatggtgtgatctcggctcacggcaacctccgcctcctgggttcaagcaattctgcttcagcctcccgagtggctgggattatagtcatgcgccaccacacctggctaattttgtattttaggtagagacggggtttctccatgttggtcaggctggtcttgaactcccaactcctggcctcggcctcccaaagtgctgggattagaggtgtgagccaccgtgcccagccaggacaagtcttcttacagaagaattccaattagtaaatgtagaaggattgagagaaattgaaaaatcatcattagaacaccggaataataattgctgcaggcaacatctaccaatgaacaataaaatgagtgggtgaaactttaaggagaaacaaggttttttttttagaaacgggatcttactacattgtccaggctggtctggaactcctaggctcaatgggatcctcccacctcatgctccccagtagctgctactacaggcacataccaccccaccaggcttgaaacaaaatatttgcatagcctcaaagtatctatccccaaatatgtattaattagtatggtggttttaacatatgcatacatgttctttgatgctctgccatctaggaaatggagcttaatttttctcctcttgagtgtgggctggactcagcaacttgcttctaacaagtagaatgtggaaaggcaaaaacagtgacttcacagtggaaaaatctggcagacaccaccttaaccaaatgaaggctggcaccaccagtcaaaagtcttgttgatatcacagcctctgaaatgatgtggtgagaagggcacttggcctgagtggcattcttcccccaaatccgtaacgtcagcctaatcatgagaagacccattctacaaaagatctgaccagcactcttcaaatgtgtccaggtcacgaaagacaaggaaaggacaagaaacggtctcaggttggaggagactaaggagacgtggctgaaggatacacaggatctccctgtactgtccatgtaactcttcaataaatctacaattatttcaaaatagcaaaaaatacgattgctggccgggcacagtggctcacgcttgtaatcccagcactttgggaggccaagaagggcagattacttgaggtcaggagtttgagatcagcctggccaacatggtgaaaccctgtctctactaaaaatgcaaaaattagctgggcgtggtggcatgtgtctgtaattccagctgctcgagtagctgaggcaggagaatggcgtgaacccgggaggcggagcttgcagtgagccgagattgcgccactgcactcccgcctgggccacagagcgagactccgtctcaaaaaaaaaaaaaaaaaaattactgtggtcaagatggaataacagggatctggtttaacacaccccaaaaaggacctaagaaaggaccattccctctcctctctgaggtgggaagatctgggaaggagaggaggctgaccagtggggtctaccttctgctccacccctcttctatccaagagtctgagcacccaacccccacaccaccctggaggctcccgccctcgtgctgagtctggcatgccctccccatccctactggcccaggggactaggttagctcagagaagcccttctaactcacccacaactggaccaaagaaggattgatctggggccactgcctggtccctgggagcactgtgctagggcagggggctgagatgccccagggtaagagacagaacagtgatttttttttttctaagacagagtttcgctcttattgcccaggctggagtgcaatgcgcgatcttggctcaccgcaatctccgcctcccaggttcgagcgattctcctgcctcagcctcccgagtagctgggattacaggcatgtgtcaccacgccccccggctaattttgtacttttagtagacacagggcttctccatgttggtcaggctagtctcaaactcctgacctcaggtgatcctcccaccttggcctcccaaagtgctgggattacaggcatgtgccaccgcacccggccaaaaacagtgatattcatatagatgggggagggattaatgggggtggagtgagagagagcctgctggagcagtccgaaaggcaggcattccttctgttcagcaacattcctgcccccacaatctcctcccacaacttatatctagtgcaggctgagagtgaatctgtctgccagtgttcaagccactgtgtgaacctgagtttcttaaccgttctgagtgtcaggagtttttttcatctccaaaataggagcaacaaggataccaatcccttgagattgtatgaagcttaatgcacttaacacagcacctggcacgtagacatgctccctaaatgccagctgttattatgaaagagagaagtctgaggttcagaactagcaggcaacacataatctataatgatggatggctcagacagggtcctgtcctatagggactcacagtctagtggaaaggacagtcctgtggacagcaaatggcaatatacctgggtaagtactgtaatagaataacaaagtaatatcctatcacggggcagtcacgggggcagtgagagacaagcgcttgtccatgccaggctctgtactcagtccatcacatacattaggtcttgcagtcctcataccaccataaggtggttaccattatctccaattcacagaaaagcaaacagtatggagtgtttaagcgtcctgtccgagatggcatagctagtggagctgaaatttgaacccaagtaatccaggtccagaatgccccggatgcagaaatgaccacacagattctaccaatgaactaacctgataaggttggaggtcatactcataacccctcacacaggtccacacagacacaggcaagcacacccatgtctattcagatacacaccaattcctgtctatgacgagcgctcagaaaatcctccacaacaccacaccaggaatgatgtgcattttgagaaaaaaaaaaatcagctctgaagacctcacagacacatgcagtgaaatgtaaatggagggacccacccaagttcttgaatagcacattacatgcctggatgcacatcagcgggcatgtaaatgatgacgaggaggtctgcagacactgacacgctgcatttgcactcactctgctactgaattttttagcagctacatttactgagcacctactgtatgtaaggaaagataaagcagccgggagctgtggctcacgcctgtaatctcagcgctttgggaggccaaggcaggtggatcacctgagctcaggagaccagcctggccaacatggtaaaaccttgtctctactaaaaataatacaaaaattagctgagtgtggtggcatgcacctgtaatcccagctactcaggaggctgaggcaggagaatcgcttgaacccaggaggtggaggttgcagtgagccaagatcacgccattgcactccagcctgggtgacagaatgaaactctgtctcaaagaaaaaaaaaaaaaaaagtaaaaaagataaagctcagagaagtgaagtggcttgcccaaagtcaaatggctgagattcaaaccctggccctataatattaggcaacggtgtctccctccaccactgtgcagatgcatccatgagtgaagagatgtgctatggctggattccctcattgacattccctgtgaccttggacatggcatggccttgtctggcccacattctcatgttgagtccattcacaggtgtgctccatggatgtgcatggatgggaccggcaaccctggccttgctctgagtctcagcttggcttggtgtcaccagggctgtgagcttccaatcccagccttgccatgtcccagagcacatggctcaaaaccaagctctgggcatcaggccagcagggcccctgtgatggaagaactgacaggatttcataagcatccggcccgggacacgtggtcagggcagggagaagggagataaacaggatgtccaccagggtgtgcacctgggcagggtccatggaccaggtgtggcaggggaagagctgtcaggacttggcatctgatgggcactcagcagatataggctgtgtgaggggaggagtttgtggggaggcagggctgcagctttgcttccatcctggaggccaggaatgagggagtaagtgagccattgactcaatgaatgaatgaatgagcgagtgagtgaaggaaggaaggggtaagtaaataagtgaagaatggaatgggggagggagtgaatttatttatttatttatttatttattttgagacagggtcttgctctgttgcccaggctggagtgcagtctcagctcactgcaacctctacctctcaggctcaagggattctcccacctcagcccccagcatagctgggactacaggcgcatgccgccacatcccgctaatttttgtattttctgtagagatggggtttcgctatgtcggccaggctggtctcaaactcctgggctcaagcgatctgcctgcctcagcctctgcagtgctgagattacaggtgtgagccaccgtgctgagctgtgaatttattttttacacaaatctgagtgctcactctgtgctggccctggacgggtctctgtggatgtctggtgagcaggatggacacagcccggtcattgcaacgctaaaagcttgaatgacaccagtcaggctggggaactgggagggcccttgacatgcagagtgactcagccagtgtgagcaggggttgtcagcatgcctaggggagcaagagactgtgagagatgtgtgtgtatacttgtgtgcctgtgtgtgtccgtgtgtacacatgtgtgcgccgacacagccaggtgttggccaatgcaggtgtggtgtcctcaagagcacagtgcatcctgattcttcaccctcccaggcctcccctgcccctgttgtgtgccagctgggcctgccccatgttatgcctgacgcccacgcaaaagctgcttcttccagtcacaggacaaaggcatcctcagcccagaccctgtaccccaggggtaaagacctctcagacccctagtgctcctcagcatggacctctccaccaggagcctcagagttgtgagaagcacaggcacccaaagcccaccgccctgtgtccatgtgcatggagtgtgcccaggtacacgcaagggctggagatgccccagggcggtccagacagacgtgcagatgacacattggccactgagtttccacagacactgagctaagtgctttcgagacacactgggtgaccttaggcgtatcaccctctctgagcctcagtttctaatctaaaagtagggtaattatactcacttccagtcttgttagaataactcaatgcatgatcagctcaacacatcatgattatttttcctgagttcctgccttcccagctatattgtctattcctcaacagtacccactgagtcttatatccccgtttctcctatgatactccattacacaggactcaaataactacctgctctaagaattgctgagtgacatgtagtcctcataaatagcaataatagtcactaacatttatataacaacaagagccagcaattttgattttttattgtgtcaggcattgtgctgaacactttacattccttcattcatttgacaaacattcactgaacacctggtaggtgctgggctctgtgctagacctgcagatgcagcatctctgccctcaaggttcttacattctgatggggaagaagagacagacaaaagacagtttggcggggcacagtggctcacgcctgtaatcccagcactttggtaagccgaggcaggcagatcacttgaggtcaggagtttgagaccagcctggtcaacatggtgaaacccctgtctctactgaaaaaatacaaaaattagccaagtgtggaggtaggcatctgtaatcccagctactcgggaggctgaggcacaagaatgacttgaacctagaaggtggaggttgtagtgagcagagatcgagccactgcactccagcctgggcgacagagcgagattcagcctcaaaaaaaaaaaaaagataatttaatacataaatgggataatttcaaaccttgacaagtgctacaaataaaataaggaagagttatggattagagacaaactgcagggattaggtggggcatgatgcttgatgagtgatcagggagggcctctctgaggagcaaatatttgatctgagacctgaagaagaaggaagagcctggaaagatacaggaaaagttccaggcagatggcatagcaagggcaaaggccctggggcaggaagaacttggtaggttcgaggactaggagaaagggaccatagctggaggatgattcagcaaacctggcaggtctgtcctggatgactcagcaagccttgcaggtctgttctggtttcagaacccaggcattttgtccttcactccaggctgcctcagagacatgcatccctgccatacacaacaatgtgtgcacgctggcacacatgcacatgcatgcacacacacactctgcatgctgacacacaactaagggccggaccagccatgatagtctaagacactaacatttttctctagtgtcttgtggggccaagtagaagggccagatgtcacctttgcccagccttccagaagttctgggccaaagaaagattaaatggcaggaagagaaaaatggcttaataaggaggtgacggggaactcgggtggcctgtgggggtgcggagatggggggagatgatagagatgtgagagcccatgggcacatcccctctggggaagtgagggagcaccgagaacagagaagcagagggagtggagacggttctcagaagcacagggcctccacactcaccacagcccctactcagccgacatgccttgcttcctctcacctcccctggttcacctcagagatgggacactcattgcccaccagggcagcctgggtggtgccaactgtgagagagctccccttccacatctgcctttgtggctgtaaaatgtggaaagaataagagaaatacctatgaaatctgcaggaagatactttcttttttttttttttttttttttgagatggagtttagttcttgtcgcccaggctggagtgcagtggagcgatctcagctcactgcaacctccgcctcccaggttcaagcaattctcctgcctcagtctcccgagtagctgggattacaggtgctcgccatcacacccagctaatttttttgtatttttagtagagatggggtttcgccatgttgggcaagctggtctcgaactcctaacctcaggtgatccacccacctcagcctcccaaaggaggctgggattacatttttctaaatcagttcggtaaaaatcaaaaattttgagaacacctggtgttgtagttctgggaagcaggtactcacatgctttgctggcaggaggtagattgataacaatctctatagaggaggagccagagatctctcttaaaagtgcaaatgcacaaacttttgacttagaaattctgcttctgggcagggcgcggtggctcacgcctgtgatccctgcctcccaggccaaggttgcagtgagctgagatcgcaccattgcactccagcctgggcaacaagagcgaaactctgtctcaaaaaagaaagaaagaaagaaagaaaaattctacttctaggaaattagctcagaacttctctccacacccccatgtatgaacactgcagcattttttgttatagcaaaagactggaaataattaactgttcattgacaagggatggtttaaataaaccagtacattcctaaccatggaataggaccaagctgtaaaaactgaccaggcaggtctttctggactgacacggaagagtccccaagataaattgttaaataggaaggaaaaaggcaatctgaaggacatggagtgtgctcccatctgtgtaaaaaagtgacaataaatcctcatattttatgtcttgaaggaaacacgagaaaatggcttgaccccaggaagatgaactaggagctggggataggagtgggagggagacttctcaagtattactcttctgtgcctttgaattttgagctaaaatatttaaataaaatattaatataattaatataatacaattaataattaatattgaataaaataaaatatctaaaaatctgctccccgggtgcggtggcccacgcctataatcccagcactttgggaggccaaggctggtggatcacctgaggtcgagagttagagaccagcctgaccaacatggagaaaccccggctctactaaaaatacaaaataattagccgggagaggtggcgcatgcttgtaatcccagctactcagcaggctgaggcagaagaatcgcttgaacccggaagacggaggttgcagtgagccaagatcgcaccattgcactccagcctgggcaacagaagcaaaactccgtctccaaaaacaaacaaaaaaacaaaacaaacaaacaaacaaaaccacaactgtctgctcaaaagtgccatcctcctacacactccttgccctcagctaagttctgtccccatggaactctccctggaagagacaatctgtctcccaagagagcaggcctatgtgtgagtcctggttccatcactgaccctaagtgtgacctcaggcaagacactcccacccctgacttgtactagacagttctccccagcactgacattctgtctctcctgctggaggggcaggagggcaggcacagtgtcttcttgctctgtgattcattcagttcacttaaactgagttacctactccaggccagagtttgggttcatccatttcttgccctccatgcccaccccagggtctggcatgggagttggtaccctataggagttctgaacagactcagcttacggatgaggaacagacggtgggtcagatgcgcggtaaggagggtcaggtacacggcccatgggatcgaatagattcatgggtgggtctttaagacaaccgccttcactcaatcctaagccctccccacagctaccaccctattttttctcccctttgcagaaaagggctttgagaaaattgtctatcctcgctgtttttaattagtcttctctctctctctccctctgagacaggatctgctctctcacccaagctggagtgcagtggcgtgatcatggctcactgcagcctcaacctcctgggctcaaacgatcttcccacctcagcctcctgagtagctgggactacaggtgtgcactaccatgcctggctaatttttgtattttttgtagagactgggttttgccatgttgcccaggctggttttgaactcccaggctcaagtgatccatccacctcagcctcccaaagtgctgggactgcaggtgtgagccaccacacctggccctcttgtctcttaagtccatttaatcatgcttctacctgtcacttccctagttgaaactgctcttgtcaatttcaacacattgctaaatccaatgtgttcagttctcattcttcatctttttttttttttttttttgagacagagtcttgctctgtcacccaggctggaatacagtggcacgatcttggcccactgcaacctctgcctcctgggttcaagcgattctcctgcctcagcctcccgagtagttgggactacaggcacaagccaccaaacccagctaatttttgtatttttagttgagacggcatttcaccatgttggccaggatggtctcaatctcttgacctcgtgatccgcccaccttggcctccaaaagtgctgggattacaggtgtgagccaccgcacccggcccattcttcatcttcttaactgatcaacagtttgacacagctgaccactccctgctctttgatgtacttcttttcacttggtggccaggcctccactctctgctggttttcctccttctcaggctccctgcttctcccattcctgttggagcagtgaggacttggtccctggagctctcatccagtctcacgtctatgactcccaacactgtatcctcagcccagacctctcccctgaactccagcccatacattcaaatacctacctgatgtctctttgaggatgtcaaaagacatgacagactccacagaaccaaagctgaacctgggcttcccccaaacacctcgctccatgtcatttgatggcagttccatacctgtcaccgttcaggccaagaaaccttggaagcaccttgacacctccttttccctcaaactccacatctagaccatcagcaatcctgttggctccacctttaaaatatacccagaatccagtcacagctcacctctagcatggccactgccctgctctgagccactggagtttaagagaattattgcaacacctgctcccttgtcttcctgtccttgcctcattcagtctattccaagtacagatccctaaatgattttattttaaaagtaagtcaaggctgggcatggtagctcatgcctgtaatcctagcgcttgaggaggccgaggaaggaggatcacttgggtgtaggagtttgagacccacctgggcaatgtggcaaaaccctgtctgtacttaaaaaaaagaaaaaaaatggctgggcatggtggctcaccctgtaatcttagcactttgggaggctgaggcgggtgaatcacctgaggtcaggagttcgagaccagcctggccaacatgatgaaaccccatctctactaaaaatacaaaaattagccgggcaaggtgatgcacgcctgtagtcccagctactcaggaggctaaggaagaagaatcactggaacccaggaggtggaggttgcagtgagccaagatcgcgccactgcactccagcctgcatgacaggagcgagactccatctcaaaaaaaaaaaaaaaaaaaaaaaggtaagtgagatcacttccctcctctccttaaaccctcccctgcctccccatgactcctcagcgtcctttcaaaggcctccaaagctccagattatctgaaccccctttacctctctgacctcatctcccaccgcctccctgtcactggctgcactccagccacattgaccttctccgatggcacaccagtcagctagtcagcttccttttggagcttttgcatgagctgttcctcttcctgaagaatttgcccttcggatagtctcagggcatccactgaacactccactcaatacagccactgcctgcccacccaacactcctcatctctgtacttactctttttttcccttgcattcgtcaccccctaacatgtgctacaatgtacttattatggtaattatttcttgcatgtttctttctttttttttttgagacagggtctcactctgttgcccagtctggagtgcagcagcatgatctcagctcactgaaatcttggcctacctggctcaggccatcctccctcctctgcctcctgagtagctgggactacaggcactcaccaccatgcctggctagttgttgtacttttttgtagagatgaggtttcaccatgttgcctaagctagtctaaaactcctaggctcaagtgatcctcccgcctcagcctcccgaagtactgggattgcgggtgtgagccgctgtgcctggctgcacttttccttctaatggaatgtaagcgccacttttgtctgttattttcactgtagtatccctagcctttggaatgttgcctggcaagtagtaggtactcagtaaatatttgttgaagaaacggatgattctataaatagcatggattgatatgggaaagctatgtaggtggatggatggatgcttgtcggatggagggtagatgaaagaacagcgagaaattcgaatggctagatggtggggatgcattataaaataataattcatagatggaaaaggaatgaatagatgggtggagggatttaatctcttcaactactatttactgaccacttgccgtgtgccaggcactgtatgaggtgctagagacactggtgagccacacaggcaaggtgcctgtcctaagggagcctgtagttcagtgggtgaggcagacactaaacaaataacaaatacatacataattccaattatagttaagtgttctggtggaaaagaacaggatgctctgggagagaataatatggataagtgatggaaaaatggacaataaatgggtagatggagatggataggatcggggttatttgccttaaagggcctggcttcaggactggagctgctttaccttaaagggcctgtcggaccacatgtaccatcccacatcccagaccagctctgcactcagagactgtccctctctccctgccctgactcagcacctgcctggcctatccccagtggtcctgcctgactctacctccagctcccaccctgctgagtcacagtcaggctggtcagggggctgtcccatgttcagtccagcccctcagccttcctcgacctgggggggtatggggagcagcccagaggggaggggagcaggtgccaagctcttgattcctgtgcctgagcactgccctgttgagaccagagagagaatctatggctagggtatctggggctacagttggggtttatctggggcctggggtcacacatgatggattagagctaaatctatctccagggttataactcaatcaggagctagaattcaaattcagtttatggatcatgtggggaaaaagtgaccaagacaccgttcagtttgggacctgggtcggcgttagctgtggctacggcccagggcttagtgatcacaggtcagaccatgttcaaggtttcaggccagagtgcagttgaagtgcaaagtcaggcaatagggttcaccctaggaccacagtcaaggatctgggtcagttagtgtccagggcactggccttgtctcctcttctttgggagagaagccaggtggatgagttggatctaaatgtcctgaggagcaacttccagctcaagttccttcacccaggcggcctaagccctctcagcactggccccaaagccttccttcatccctcaacttcctccatcactccctgacagcctggccttgctcagtgtccctcgcaaggctgaacagtcctcattctggcacctcaggggacagggtaggggtggggactatgggacagggctcagtgctggacccaggagggcgccttgcgcaaggttttctgatgcaactggctgagtgcttcagcattccacccccaccccccaagcttttctcagaaaggcaaggcctgggcagttatccagactgaacatataatccccttccttctctggcctttgatggcttcaggacctgcaggcaaaaggaaggcaggaaggcaggcaggaaggaaggaaggtcaggtgactcagcaatgcgtccagcactgggagctggcagatctggggctccctcatcctccagctgagaggcgagaaagagaatcaggatccctggaagtttggagatcctaaccccttatacatacaaagcagcaattatgtgcctaagcccagggagagacctgtagctgcccaaggtcagaggcaaggtcagaaccagaccagctgtcttcagcccatggctatgatctagctatttccactacacagaaagagagaacccttcacccttgaggaggacacgggacttccccaggaacctcccgtcaatcctgttgaggctcctgaaatggtggaatgacgtggactttggaaccacgcagacctgggtttaaatcccaggccaggcacggtggctcatgactgtaatcccaacactttgggaggctgaggcaggcagatcacttgtggtcaggagtttgagaccagcctggccaacatggtaaaaccccatctctactaaaaatacaaaaactagccaggcgtggtggcacacgcctgtaatcccagctactcaggaggcagaagcgtgagaatcgcttgaacccgggaggcggaggttgcagtgggctgagatcatgccaccgcactcctaggtgagagtgagactccgtctcaaaaagccacactggctagctgtgtaacgctgggcaggttactttcactctttgacactggatttgctcacttgcaaagtgggcgtaaatgcatccttagctcacagggctgtggtgaggctgacatgaggaagcactggaaggcacagcttaggctccacatgggccactctcaggaagtgtgtccccacctccccctttatcctcagctctcactgggtgtgtttgctggggaaggaggtgcagcagccctggggccttggaaataataatagccactcaccctccagtgcttaccatgtgctgggaactctcctaagcgtgaacttaacctgtattagcccatttaaccctccatttaatccaataacagttcccaggccaggcatggtggtgcatgcccatagtcccagctactcaggaagctgaggcgggagtatcgcttgagcctgggaggttgaggctacagtgagtcatgatcaccctactgcactgcagcctgggcaacagagtgagatcttctctcaaaagaaaagaaaagaaaagagggaaggaaggaaggaagggagggagggaaatcccaatgacaataagcagttcaataaccctacaggaaaacactgtcatcaatcccactttatagatagggctgtgggtctgagtagctaagtgactttgtccaagacagtggacaagagaccacacggattttgagccaggccagctggctctgaatcccactgtctcctccctccttaaactagtgatgtcactgctctgagccctggtttcctcatctgtctccagggataaaaatagcagcttcatggggaagtttgaggatgacacaagatgacgtaagggaggtccccacacagggctccacccacaggcatgagaagagcctttctcaggaagaatcccaggccgcccctggggcaaccgccgggctggccttcctgcctctccttaggcccagcctagcgtgatctggatggtgagagatttctgcaaagcccccaggggcctccagagaagggaggtgcccggtctcctagataagggctcccagagaggatcacagccctggagttgccattcttgaatcacccactgtcttccccaagttgattggtctgaatccatgtacttattttttatattagttccataatgtcttccttccaaccagctcatcttttacttatttatttatttatttattttatttatttttttatacagagtcttgctctgtcacccaggctgaagtgcagtggtatgatctcggctcacggcaatctctgcctcctgggttcaagcgactctcatgcctcagcctcccaagtagctgggactacaggtgcatgccaccacgtccagctaatttttgtatttttagcggagataggtttttgccatgttggccaggctggtctcaaactcctgacctcaggtgatccactcacctctgcctcccaaagtgctgggattacaagcatggaccactgtgcttgaccacaaccacctcattttaaaaaacttatctaaatttatttaacatggaaattttaaatcactgacctcaaatagaaaactactatgatttgccataaagaagaggtaagcatacaattacatacaaaaaaagcagaaccaggttattccattccagctaaatcctgtttcttgctgaaggctccaagctgaactctgctgtctcattcttaacaagagaggtgttaaaaacatagaagctgtgaggccgggcacggtggctcatgcctgtaatcccagcactttgggaggccgagcgagtggatcacgaggtcaggagatcgagaccatcctggctagcacggtgaaaccccgtctctactaaaaacaataacaacaacaacaacaatcagccgggcgtggtggcgggcgcctgtagtcccagctgcttgggaggctgaggcaggagaatcgcttgaacccgggaggcagagattgcagtgagctgagatcataccactgcatttcagcctgggtgacagagcaagagcaagactccgtctcaaaaacaaacaaaacaacaacaacaaaaaaaaaaaccatacaagctgttggccgggcgcggtggctcacacctgtaatcccagcactctgggaggccaaggtgggtggatcacgtggtcaggagatcaagaccatcctggccaacatggtgaaaccctgtctctagcaaaaatacaaaaattagctgggtgtggtggcacacgcccatattcccagctactggggaggctgaggcaggaggatggcgtgaacccgggaggcggagcttgcagtgagctgagatcacgccagtgcactctagcctgggtgacagagcgagactccgtctcaaagaaaaagaaaaaaaaaaaaagaagctgttaaatgagactttctccctgagtctttggagaaacagcaagaaaactgaaagggtttaagtgtatcacaattatgattcaaagttatgtcatacggtatctggagaccctaaaaccctctggcactcagccattgttgtacatggtatatttcagaaaacactgacctcactgacctactccaactttctcttcttattttacagataagaaatttgaagcccccgcaaagggaggtgacttgtccacaatctcacaggctcagtggcttcagccagacttggaacgcaaccagaagttctaaggcatcatgtcacttttgtgggggaaatgtatgaagatgaaaagtttcaaggacacctatggtggaattttaggcatatggcaatcactagggacacccatgtggaaggaaaggaggcaggcatggctcatgtcattgctgtgggccccacatcagtgctgggggtcagagacggaactcatcagaactatagcaaagaggccgggcacagtggctcacgcctataatcccagcagtttaggaggccaaggtgggcggatcatttaaggtcaggagttcgagaccagcgtggccaacttggtgaaaccccgtctctactaaaaatacaaaaacattagccaggtgtggtagtccacacctgtaatgccagctactcagggagctgaggcaggagaattgcttgaacccgggaggcagaggttgcagtgagccaagatcacatgccacttccctccagcctgggcagcagagcgagacactgcctcaaaaaaacaaacaaacaaacaaaaaaccaaacctataggaaagagaaaagcagccttctgggctcagaaatctgagtagaaagatgttctgagcctggagaaagaaattcataaaagcctgactctctctccagaaaagagtacatttctgcatttaattttgggaggttggtcaccattcttttcctcgcttctaaataaatgcttatatagcatttatattccagtcactttacaaatattgtcatttaattctcatgcaaaccaacgaggtaggaactattgttatccccattttacagatggggaaactgaagtacaaagagctgaagtaacttttccaaaatagatgtggttttgaacccaagaaatgtgatacaactatgacatgaggcagtcccaatgcattgaatccttatgactgcaatgcaagggaggtataattaactgcattttatagatgcagaaactgaggcttgaggctatttggtgtttctggtgtagatctaggagccaaactccagcctacctagactctttgcctctgctgtacccctggaccatgtgttaggaattcttggtacagggtggtagtgctcaatatggtagtggttttagtctgttttctgttgcttataacagaatgtctgaaactgaacaattttgaaagaaaaggaatttattccttacagctatggaggataggaagtccaagattgagggggcacttctggtgagggccttattcctggtctctgaagtgtctggaggtggcacagggtatagcgtggagaggggactgggcatgctgacatgctatgctttggtctctcttcctcttcttataaagccaccagttctcctcctgtgaaaacccacaaatccattaatccatgagtgggttagtccattcataagggcagaggcttcatgatccaatcacttcttaaaagtcccaaccgctcagtactgccacattgggggattaagtttccagcacatgacatttgggggacacatttaaaccatagcagtagccatttgccacatgtggttattgagcacttcaagtatggctaatgtggctagtgtgactgagaattttttattttattgaatattttaatttttttttttttttttgagatggagtctcactctgtcgcccaggtcagagtgcagtgtcatgatctcggctcactgcaacctccgcctcccggggtcaagtgattctcctgcctcaacatcccgagtagctgggattacaggtgtgtgccaccatgcccggcaaatttttgtatttttagtagagacagggtttcactgtgttagccaggacgatcttgatcttctgacctcatgatccacccacctccgcctcccaaagtgctgggattacaggcatgagccactgcgcccagcctcacattatatttctattggaacacagaatggtctagagaattgggatttgacaaacccagctgtgacaagtcaccaaaatttgggggccatacccagggtgccgttcctgtcacgatacccataggtccatgtggaggctgcagggatacaaagctcgtgaaatatcccaggatggcatgggcactggagtcagctgccccaagttcaaatctgaaatcagtctttttgttttttttttttttttgagatgcagtttcactcttgttgcccaagctggaatgcagtggcgcaattggctcactgcaacctccgcctcctgggttcaagcgattctcctgtctcagcctcccgagtagctgggattacaggtacatgccatcacgcccggctaaatttttgtattcttagcagaaaccgggtttcaccaccttagccaggctggtctccatctcctgacttcaggtgatccgcctgcctcagcctcccaaagtgttgggattacaggcgtgagccaccgcgcccagcctgaaatcagtcttatacgaccagctgggtggtcttgggtaggtcccttaccttaactcttcttgtctgcagaatggaggtgacttactgtttttctctgtctccctttcacatctttgcactcttcaccccttctcttccctcagcttttagtttaaacatcacctttctgataagccctgctgaaaatggccaccctcagtcatgacggagaacaagtctttcctattttattcaagaaaatgcatgatgcaatctattttaaatgatcatggttttaattttattttcctgataatggtctatctctccactgatttataagatttgtaagagcaggggtggatcattctggtcactgctgagtccccagcatttagaacaggggctgacacagcacaaaacaacgttagttgggaatgtacaagcaaacccagcacaccttcagaggggtgctcaggaaacagccctcccacctttcttcacccctcacagctgtgggatcttcctaaccatttcggtgtcccaggatagaggatgagtttattcacccctccccagcaggggagttgccaggattaaatgagatcccagaatgccctggtataccctgaaggctctgggacacaggtgagctggtccccagggatttggaaacaggaaaacaaatatgactccaccctgcctcccatccagcctctgcctagaggagttattttattttattttactttttttttttttttgagacggagtcttgctctgtcgcccaggctggagtgcaatggcgcaatctcagctcattgcaactcctgcctcctgggttcaagcgattctcctgcctcagcctcccgagtagctgggactacaggtgtgttttttgtatttttagtaattttttgtacttttagtagaaacgggtttcaccgtgttagccaggatggtcttgatctcccgacctcgtgatccacctgcctcagcctcccaaagtgctgggattacaggcataagccaccacgcccagcctctagaggagttattttacttacttacttatttatttattacacaggatctcactctgtcacccaacctggagtgcagtggcacaatcacgtttcactgtaacctgaactcctgggctcaagtgatcctcctacctcagcttcctaagtagctgggaccacaagctcgtaccaccatgcccgctatctttttctctttgtaaagacagggtcttactatgtcatccaggctgttctcaaactcctggcctcaagcaatcctcccgtcttggcctcccaaagtgctaggattacagacatgagccagctcacccagctgaggagttattttttgacactggtgaattcagatcaaaagggatttctaagaaaggtgctggacccaggccgggcgcggtggctcatgcctgtaatctcagcactttgggaggccgaggcaggtggattatctgaggtcaggagttcgagaccagcctgaccaacatggagaaaccctgtctctactaaaaatacaaaattagccaggcatagtagcgcatgcctgtaatcccagctacttgggaggctgaggcaggagaatcgcttgaacccgggaggtggaggttgcagtgagccgagatcgtgccatcgcactcaatcctgggcaacgagtgaaactctgcctcaaaaaaagaaaaaaaaagaaaggtgctggacgcctaggacgcagaggggtgtttcaccccaaatcaagtagcaccaagccctcccaggccttgggtgcaagcatattaaaggcctctttccctctctgtctccattgtttacactccactgagcatccgcaatgtgccacacactgttctaagcgtcttacacatattaaattatttaatcctcacaacaactttatgaagtgagcgcaattatgagcccattttatggagcaggaagttgaggcagggttttaggtagcttttctggggtagcactgtgggttggagcggaggtggagtgcactcttaggccagctggctctaggggctcttcaccactaggccgcactgcctctagcaaagggacgcggggaagctcagcagaccttaggcctcccaagggcgccacggtggttcctttgagcccagagtcagctcttaagtccataggccttcctgaagcttctgaaccacttgcccatagctgggcctcaggctggctctcagtagaatgtggagaatggagattcccgcatgtccacttctcctaaaggttttataaggcagtgctgggaatgtgctttataaaaaaggggaagcaccccgacaacagtcactgtttgctcttttaagcaccatcctgagaaggaggaatgttcttcccatttcataggtggggaaaccgaggctcagaagagcaaatttttggccgggcgcggtggctcacgcctgtaatcccagcactttgggaggccgaggcgggtggatcacgaggtcaggagatcgagaccatcctggctaacaaggtgaaaccccgtctctactaaaaatacaaaaaattagccgggcgtggtgcgggcgcctgtagtcccagctactcgggaggctgaggcaggagaatggcgtgaacccgggaggcggagcttgcagtgagccgagatcgcgccaccgccctccagcctgggcgacagagcaagactctgtctcaaaaaaaaaaaaaaaaagagcaaattttttttccaaggtgatagggagagtccgtggctgatgtctgcactgaccagacgcccctagggggccagcgagggcgggtcccaggtgcagcggatgcagaggagagaggcccgggcgcggcgcgggggatggtgcgatcccgggcccgagggcatcagacggcggctgattagctccggtttgcatcacccggaccgggggattagctccggtttgcatcacccggaccgggggattagctccggtttgcatcacccggaccgggggccgggcgcgcacgagactcgcagcggaagtggaggcggctccgcgcgcgtccgctgctaggacccgggcagggctggagctgggctgggatcccgagctcggcagcagcgcagcgggccggcccacctgctggtgccctggaggctctgagccccggcggcgcccgggcccacgcggaacgacggggcgaggtactcggcggggtgcggcctgcggactcgcccggaggccggggggcgggagggggcggccggggaagggggcgccggaagcctctgggcgtctgcgtgttgccgcgtgttacacgcacgcacgccccttacacaccttttcacagaccccgccgtcggggcgcggccaggtcagatcccttttgatccgggcctgggctgagtgctccccccgggcttcaggtgacgcggccccgcggagcgtggggtcgcccgagttgggctggggaagccagggacggaggtgtccggccgtcacccctagaggagggcgtgcgggggtctgttttgcgtgagtgcgggataggggagtcgtgtggtgcggtgaggggcttgtggggggcactggaggactctgggggtggcgggggatccgagggggtcctcgtgaacccgcaggggagagtcctgggtgagggtgggtcccgagcacctgtgtctcaggagatggtgagagctgtctggagggctgggcacttggtggcaggggttggcggtgcaggggacaccgccgggacagggctggggtgccctggagcgggggagccgagggagtgggagcgggggcgcagcgcgcgatctctggcccggcagggccgctggttctccccagtgcgcggctccgggtttgcaggtggacggtgcgcgcgtgtctgcggtgtgtgctgtgcctgcagaccggggagggcgggggacgacagccacctccttccctctgcctcacccccctcctgtcccagggccgcgcttcaatttccgctgaaacttctgactcggacacccgccgcctttcgcttgggctcccacgggaggggcctggctgcggggggcggggcggggtgggggtgcggccttgctcgggtagaccatgggtgtgacagctgggagggctgtgtgtgtgtgtgtgtgtgtgtgtgtgcgtgcgcgcgcgcgcttgcgcttgatgtaacccgccctcatttccctgggtcccgagtgtggcagggaacagcaagaggtagatattaggggctgctttcattccacatcacagattctattctgcagtgtggtctgcaaaatgccttgcccaagatgtatagactcagttaccgcatctgtccccatctgggtggagcttatcccaggccccaacaggctctgagggatggccggggccaaggcagcctggactactgatgtggcacaggccagagggactccaggcagtctcctgctgcacagggcacaaagcatgtgcacagccaggtatcatcctgcgtgactcagaacagccttgagatgtaaggagtgtcatcccagcctcgaacctggggagctttctaagactcccaaggatggtacttatgcatcttgctgtgaagaataacaggatgagtgctaataatgaccatttcctgacacctacctggcaacaggtccataagctctacatgcttcatttgtgttttcatttcatcatcacgaaaaacctgtaagctttgcatcctgttcccactttacaggaactgaggctcagaaagcttgaggaacttgaccaggggtaccccccagctagaaagggtttgagacaggattagaacccaggaatatctgactacagccactccttactgcattcttaccaagccaaagtcatgacctttcactcatgtggggaggccttcccttccaaggcagctcttccatttgggagcagcgtacttggagaggtgggcctctgtctggtaactgactcatgttgccttgttaatcctgccttgaactgttgggaaggtctttaaccaggctgaggtctctcgcaccaatgcccatacctgggcatgcacctccttggaatggagtttaagtgggtgggcagatgggttctagagagaacccgtctgccctgaccatgccctactgccctctccttcagccaccacacacacagtcacacagctgcgtgaatggtggctttcctttcacttaacagttcactctggagatccttccaattaccctataaagagcatcctcaaccttttaaatggctgcacattgttccgttgtgtggatgaagtataatttatgtaaccagccctgtaattatagacagccaattatttctgtcaaaagggctgcaggaataactgtgtatttgcatgcttacacacacacacctctacagaataaattcttagcaatgggattaattgctgaatcaaagctcacacgcttttcatcgttgtttttgttttgttttgttttgctttgttttgagacagtctcactttgttgcacaggctagagttcctgaccatggctcactgaagcctttaccttctgggctcaagtgattcccctacttcaacctcctgcatggctgggactacagctgtgtgccatcatgaccagataattttttttttcttagggacagggtctcgctacgttgcctaggctggtcttgaactcctgggctcaagtgatcttcctgcttcagcctcccaaagtactgggattacaggcatgaagcactgcacccagcctgtttttcattttgatattgtcaaaatgcactcctcagaggtggtaccttttatcctcccactagcactgtcttcattgttagtggctgcactgccactattccacagtataaacccacttttcatgacactgccaagacataagggtctgaaatacttaacagttttcttccacagtccccaaaatacaggcttctcccccagctcaggacatgaagccatcatccctcctcattgcaggagccaaaggctggacctcacctcgattccaccctctccttcacccctcacatccaatccatccagtccatccagtctgccactgagtcctcttgatcttcctcctatgagcccttaacttcgcgtctccatctagcaccccctagtccaggtcaccttctcctgcctggactcgtgcttgtgtgggcctcctagctagtctcactgccccgtcttgtactttcaaatccaccctaaaagcatgatgttcccctgctgaaatccttcagtggctccccactgcctttggataattccaaatcctattgtgtgttaattaggattaggctcagctgtaatatagaaacagccacttaatagctaaaatgaaatagacgtttttttcttctttttctctttttttgagacagagtcttgctctgtccccaggctggagtgcagtggcgagatctcagctcactacaacctctgcctcccaggctcaagtgattctcctgcctcagcctcccgagtagctgggactacaggcatgcaccaccatgcccacctaatttttgtatgtttagtagagatggggtttcaccatgttggccaagatggtctcgatctcctgaccttgtgatctgcctgcctcggcctcccaaagtgctgggattacaggcatgagccactgcgcccagccttcaatagatgtttatttctctcctgtgtaaaaaacctggaggtctggcctgacaactccatgtgtcagggacctaggctcctctcttgctctactgtatgtggtacttctgaagccaaggtagatgctggagctccagcagttaggtccacattccagcatacaggaaaggaggaaatgaggaagttgggccctccctttaagaacactgtcctgggcattgtacacaacacttccacttgtgtcctactagccatatgctgatacaaggatacaagggagacaggaaatgcagtttattctaggtgtccttgtgctcagctgaaaatctcaggttctaatcctatgtaaggaggggagacctgaaactggggaccactaaccacctctgccatatgatgctcgtagagcccttcacaatagggcctctactaacctcaccttatttttatttatttatttatttttgagacggagtttcactcttgtcgcccaggccggagtgcaatgacactatctcagctcaccgcaacctttgcctcctgggttcaagcaactctcctgcctcagactcctgagtagctgggattacaggcgtgtgccaccacgcccggctaatttttgtagttttagtagagacggggtttcaccatgttggtcaggctggtctcaaactcctgacctcaggtgacctgcctgcctcggcctcccaaagtgctgggattacaggtgtgagccaccacgcccggcctattttttttttttttttaacttttcacttttttttgcagtcacgctcattctccaccgtgttcttggggaacatgcagcatgttcttttgcctcttccctcaccccagaacaggggttactggacagcggcatcaacttcacctgggaactggatagaaatgcagattcagaccttctgaatgagctactttgggagtagggcccagcaatgtatgttgaaacaggcctccagatgatctcaatgcttgctcaagtttgagaaccactgaaccgcagtatgactctccgtgtcacctggctaactctgcctcactttcaggtctcagtgtagacaccacctcttctaggaagacctctcttgacccaccagcccaggagagaggcctctctgggttcctagaggcccatgcttctctgtatagtagggctgatcacactgtatgtgatttttttttttttttttgagagagtctttactctgtcaccaggctggagtgcagtggcacaaacatggctcactgaagcctcaacctcccaggctcaagcaatcttcccacctcagcctcccaagtagctgggactacaggcatccaccaccacacccagctaattaaaaaaaaatttttttttgtagagacagggtctcactatgttgcccaagctggtcttgaacttttgggttcaagcagtcttcccaccatggccttccaaagtgctaggattacaggtgtgggccactgcacctagccttggacgtgattttattactcatctgccctccaaattgactggaagatcctgacggcaagactgctgtctaacctacttctcttcctagcacccagtgttaagtgaatgaacaagatcatatctctcatctgtgaatgtacgagagccatggattatgagattagttgattttcttaactataatttttagaaacaagctgtgtttttaagcaggtatttatttccttaaatgtacatttctgattacaaaatacttttttttgagacagagtcttgctctgtcacccaggctggagtgtagtggcacaatctcggctcattacaacctctgcctcctgggttcaagcgattctcctgcctcagccttcccagtagctgggattacaggtatgcaccaccacgcccggctaattttttttttctcccgtgacggagtcttgttctgttggccaggctgaagtgcagtggtgtgatctcagctcactgcaacctccacctcccgggttcaagtgattctcctgtctcagcctcccaagtagctgggattacaggcccacgccaccacgcctggctaatttttctatttttagtagagatggggtttcaccatgttggccaggctggtctcaaactcctgacctcatgatccaccaccttggcctcccaaagtgctgccgtgggctgcactttggcattgccttggtcacgtgctgctacctgggattacaggcataagccactgcgcctggcctaatttttgtattttttagtagagacagggtttcaccatgttggccaggctggtcttgaactcccagcctcatgattcgcccaccttggcctcccaaagtgctgggattacaggcgtgagccaccacgcctggccaggaaatacatttacatggctcaaattcaaaactataaaagtcggccaaacatggtgactcacatctgtaatcctaacactttgggaggctgaggcaggaggattgcttgagctcaggtgagaccagcctaggcaatgtagggagacccccatctctacaaagaataaaaaaaaattagtcaggcatcatagtgcacacctgtagtcccagctacttgggaggctgaggtggaagaatcacctgaaccctgaggtcgaggctgcaagtgaactgtaatagtaagagtctcctcctaatcttgtgcatcctttcagagagagagatgatagatattcaaacaaatacatacatatatataacatatttatatatattctttttaacataaaagtatagccaggtgtggtggttcactactagagtcccagctacttaggaagctgaggtgggaggttcacttgaggccacgagtttgagaccagcgtgggcaacatctcttggggaaaaaaaaaaaaaaacccaccataaaagcattctataacacgtaattctgtgtttgtctttcttctcttaatacatcttggagatcagtacgcatcagtatatagagagcttccttgtcctttttcagggctgtgtagtattctgctgtatggctataccatgatgttttcactagctttctactgcctgacatttgggatatttcctgcttttgctattggacacaaggctctgatgaacagcctttactatatttaatttttttgtgagaagtttaactggaagataaattcccagaagtggggcacccagttaaggatatgtgactttgtcattttaacacacactgccagatcaccccctataaatgttgtgccacgtatcctcccaccagcaggggaaaggaggggccaccaagcagtctcactttagtgcttttctctcctttttaccagatgcgagccacccctctggctgctcctgcgggttccctgtccaggaagaagcggttggagttggatgacaacttagataccgagcgtcccgtccagaaacgagctcgaagtgggccccagcccagactgcccccctgcctgttgcccctgagcccacctactgctccagatcgtgcaactgctgtggccactgcctcccgtcttgggccctatgtcctcctggagcccgaggagggcgggcgggcctaccaggccctgcactgccctacaggcactgagtatacctgcaaggtacgtgcccatgggcggctgtcccccagcaccacaggaggcctgggaaggaggcctccaaaggattgccagggtgcagaggggtccttatgttcattcattcttgtgtttgtttagtggggaagcatccagggagcccctgctggactgatactagagaggtaaaccagaggtcgtcccagtcctgggggagttcacagcttaggccctacagtgtgataaatgctgcaggggtagaacttagggatcatgggcgcagaaaaggccgagcagaagttagccaggtagaagtgggagatgggagttgcaggcagggggaacagctgttcaaaggcctagaaaagtgaggggatagcactttagagaatgaaaaggacttctctgtggccagagtggagaggatgtgcagaaaggggcaggagatgaaggttggcagcagctggtcatgaaggtgttaacaaggggcctccactgggctgtgcggagctactgaagatgtttgcacaagagaagggtagggcatggtagacatcaaaactcctgggacctcggaggtgatcgagcctaacctggggccattttacagataggaagactgagatgaagacaggagaagggccatgcgtgaagtcacatagcactgggcctggctcctggggtaaactaaggggtagaaaagtctgaggattcctggcagaaaccaggaaatggacagggtcaaggcccctgagggtcagcccatgcaggacactgacaagtgacagtccaagaagacagagatgagaataaaaagtgtaacaataggtattcactgtgcaccaggtactatgatgattgcttagtgtgcacaatctcttttaatcttgacacaaccaatgaggtggtttctatcattgtgccccttttatagatagaggacactgagactcagaaagccatggttacttgccacatgacagagccaggtggtatcagagctgggattgggcccaggaggctgagcccagagagtcctgtgcccgtgctaggataagcgtttcacacaatcagggcaggctgccctggcaggcaagcataaggaagataagggggacctggaaacccaagggagagtagcgggggcctgggtcccttgggaatgcacagagaagcagaaggacttaagcctcctcctggggcagcagcagagctttgctctgttgacggagatgcagtgaacagcggggcagatccagacagggtccagcccctagcttcacctggcctcttgtgcacagatctccagcgcccttaccaggtgccctaaggagcccagaactctgggtccccttcctgcagcatcacaggctcttttccactcccgctggggaggtgagtccatgataagaggaataacccaagcaggctcaggagagaagcgccatgcgttcacagggccctgattctcaagaaacatttgggaaaatccactggaacatactcacccctatgccaatgtgcaccatgggtgctgaatggtcatttccacacttcctcagcttttctggtcagtgtgtagaaagatcaaaatcttgtctttgtaaatgatcaacttattcattaattcaacacaacttcattgagcacccgtatttgccatgtaccatgctgtggttaaaaaacaaagttctgttctcatcaagctgacgttctagtgggagatacagacactaaacaagcgaataagtaaaatacgtgtcaggtggccgggcgcggtggctcacacctgtaatcccagcactttgggaggccgaggtaggcagatcacctgaagtcaggagttcgagactatcctggccaacatggtgaaaccttgtttctattaaaaatacaaaaaattagccgggcatggtggcaggggcctgtaatcccagctactcgagaggctgaggcaggagaatctcttgaacctgggaggtggaggttgcagtgagccgagatcacaccactgcactccagcctgggcaacaagagcaaaactccgtctcaaaaaaacaaaaaacaaacaggaaaacccttattccagcatctttcttggttcctttgcaatgcttatcagcatttgtcaatatttggtttctgggcatgtttgcatggcctcccagtgggcaccggagagcagagcccatggctgtcagtctagctggacatgtggctggcccgtgcaggcccagggccagcatactgaatgaatgaaagcgtgggtgggcaaagaggacgggagctgtgacggtgatgagcatcaggtgccttctgcatcatccgcccttccggattcctcctgctttgtgggttatttttctgtttgggtgacctgttacttttcagttatccgatgtttgaggccatatagcgtagcagttaagagcacagacaaaaggccgggtgcagtggctcacacctgtaatcccagccctttggaaggctgaggcgggaggatcacctgaggtcaggagttcgagaccagcttagccaacatgatgaaaccccatctctactaaaaatacaaaaattagctaggtgcggtggcacatgcctgtaatcccagctacactgggggctgaagcgggagaatcacttgaatccaggaggcggagtttgcagtgagctgagattgcgccagtgtgctccagcctgggtgacagagcgagactccgtctcaaaaaaaaaaaaaaaaaaaaaaagcacagacagtggagtgcatacgtgcaaatctcagccgtgctgtttgctggctgtgtggcctctcagcttcgttaaccgtaaaatggagcaagtcatcctaccttataggaccatggtcagggctgagtgactcggtcagtgaagcgcttggtgcgatgcctagcacatggtagtgtctaataggtcagctgtgactgtttgcaatgccagcctcagctcccgggagtccccagctgtgctaacaccatgctctgcccacaggtgtaccccgtccaggaagccctggccgtgctggagccctatgcgcggctgcccccgcacaagcatgtggctcggcccactgaggtcctggctggtacccagctcctctacgcctttttcactcggacccatggggacatgcacagcctggtgcgaagccgccaccgtatccctgagcctgaggctgccgtgctcttccgccagatggccaccgccctggcgcactgtcaccagcacggtctggtcctgcgtgatctcaagctgtgtcgctttgtcttcgctgaccgtgagaggtgagtgtggtctcagagaccccagccacagacacacccagggggtgggccatgatggagagaaaccgaggcccaggaaggcaaggtaacttaggcaagaagtgggagaaactgaagtaaccagcagcccctgtttagttccctgagaagagttgactcaggccaggtgcagtggctcacgcctttaatcccagcactttgggaggccgaggtgggtgaatcacttgaagtcaggagttcgagaccagcctggccaacatggtgaaactccgtctctactaaaaatacaaaaattagcctagtgtggtggcgcacacctgtaatcccagctactctgaaggctgaggcaggagaactgcttgaacctgggaggcggaagttgcagtgagccaagatcacgccactgcactccagcctcggcaacagagtgagattccatctcaaaaaaaaaaaaaagagttgactcagtcctcttgggagccccttgggattctgggatggagcactgagatgtgaaagtcatagtagccgacagtgacgaaagcatcgccacattatctaacgtggtcttccatccttacaaacacgaggcaggtactgttattatccccatatgatcaaggaaactgaggcccagagagctcaagtaacttgcccaagatcccatagcagaataaatggtagagctgggatttgaacctagatctgactccagagcctgggtcttaattcaatctgagcttgagaggcaggggcctggctgggcttaccaactgactttgggtgacctagtgtctctgagcctcagtttctccgttggtaaggaaaagggctggattgttagggtgttttcaggattccaagaccacagccaaaatagggtctgaggttccccacacgggaacgttttctgtgaaactgagaattagcactttttggttaaaagaatcttccttctctaggttgggatgctaagaatttttttttttttaattgagacagagtctcactctgtcacccaggctggaatgcaatggcgcgatcttggctcactgcaacctctgctgcctgggttcaagtgatacgcctgcctcagcctcccgaatagctgggactacaggcatgcgccaccatgcctggctcattttttctatgtttagtagaaacggggttttgccatgttggccaggctggtcttgaactcttgaccttaggtgatccgcctgcctcggcctcccaaagtgctgggattacaggtgtgaggtactgcacccagcctagacgctaagaaaaatttttaaaagataattctggggagaagggcagagagactcgcctcctgttccctctccagattcctgggggcagtcaagatgtgtcagggagtgcactaagctgccagttacacaggagttttctgtggagaaaggagtgtgaccccatggcattttaaaaaactttttatcttgaaataattttagacttttagaaaacctacaaaaatagttcaaagagtttctgcatatcctttaaccagtgctctccaatgttaacacctgacgtagctatggtacaattacccaaactattaactaagccacagattgattcccacttcccgagtttcccactaacaccccttgctgtgcaggatccagtgaggatcccaatttagtcatcagtggtttccttggtctcttccaatctgagacagttcctcagtctttccctgtctttgaagacccatgaccttgacacttttttttttttgagacagggtctcactctgtcacccaggctggagtgcagtggtgtgatcacagctcactgcagcctcaacctcccgggctcaagtgatcctcccacctcagcctcctgagtagttggttctacaggtgtgtgccaccccacctggctaattgagatggggtcttgctatgttgcccaggctggtctcagactcctgagctcaagcaatctgcctgcctcagcctcccaaaatcctgggattataggcgtgagccactgctcctggccataaccttgagacttttgaagagtactgatcagttactttgtatgtccctcaatttggatttgattgatgttttctcacagttagattgcagttatgtatttttggcaagaacaacacagaatcgataggcccctctccacatcatatcaagagatacttgagctgatagtcattcctatgtcgtgaccttgatcacttggttagggcaggacctaccaggtttctctactgtaaggtcctaatttaccctttgtaattgacaaataccttgggggaggtaagctaggcatataaatatcctgtttttcctcaactttcacccactaattttagcagccatccatcttgcctatagcagttattattgtggtgcttgcctaagtctaattttctttttcttttttttctttctttcttttttttttttttttgagacagagtctcgctctgttgcccaggttggagtgcagtggcacgatctcggctcactgcaacctccacctcccgggttcaagtgattctcgtgcctcagcctcttgagcagctgggattacaggcacacaccaccacacttggctaatttttgtatttttagtagagatggggttttgccatgttggccaggctggtctcgaaatccgcctgccttggcctcccaaagtgctgggattataggcatgggccgctgcgcccagcccccaaggctgattttctgttaatatttccttctacattttatattagaacaagcatgccttttttaaagaagtaacatttataatgatgtttaagctagtacataacttcaaacacattttaggcttagggtagatacaactaccccggacctcctggaggagacagcgtgcttcctgctcttttcaagaagtcacttgatggcccacacctgttatcccagtgcttcgggaagccaaagtaggaggactgcttgagcccaggagttcgaggccagcctaggcaacacagaaaaccccatctgtacaaaaaatttataaaaattagccaggtgtggtgatgcacacctgtgatcccagctacttgggaggctgaggcaggaggattgcttgagcccagaagtttgaggctgcagtgaactaggattgcaccactgcactccagcctgggtggcagagtgagaccctatctctaaagaaaaaaaagaaaaaaaaaaagaaaaatcacatgagagtcattggtagaagagggaccgtgagttagatagacctgtgtttaaatcctgggttctgcttcttacctgctttttggccctgagcaaatgacttcacctgcctgagcctttgtttcttcatctgtaaaatgggctaataatgctgacaccccttgtcccccaatactgtgattcataggattggtcagtatttgtgaaatgccactggacacccaggaagtaatgccataaagaagaaactaatagcagtggtaatagaatgattactattaaagtcatctttgagtgctcagtggaagttgtttaaagtagaaattgcaaatggcaggacacactttttttttttttttgagacagggtctcactctgtcacccaggccggagtgcagtggcgcgatctcagctcactgcaaccgccacctcctgggctcaagtcatatccttctgcctcagcctcccaagtagctgggactacaggtgcgaatcaccatgcctgctaattttcgtattttttgtagagataggtttttaccgtgttgcccaggctggtcttgaactcctgaactcaagtgatccccctacctcggcctcccaaagtgctaggattaccggcatgagccaccgcgcccagccttacacacttttttttttgccctgcttacctgtttgtgttttttatataaactggttgccaatattttttaaatggggaccttttcattaaaatacaattcctggcttctcttggggaaaacaatgggaatgtggggccatcttgggaactgcgagggtgggtcacagcactggctctgagtatctgccagccagcgttcccatcccaggcccatgctctacagctgtaaaatggtgtcttccttgcaggctgtagcctagatagaatgaggtgagccaggtaatgagctgggtcaagggccaggaacacagcaggcacttggtaaaccctagaatgcgttgtgtaccctttttaggtagcgcttgtgctgagatgtcaggcacacttcctgtttctctcatcttattacctgcctggaccctaagtttgtagctggtttaagagaggcttaaccctctcagccccatcagccccctccccaagggactctgttgaaaaatgtattcctttcagaattttagtttaaatttaattgctctgtggccttaaatgacttaacctctctgagcctgggcttgggtatctgtaaaacaggatcagacatcacaggactggcttgtgtctgtcaaaggccagcaggcacttggaaagtgggtgccacaagggtgatagcatggggtggtggcatgggggttctgggtaggacctgacccttctgtttctccccatgtcccaggaagaagctggtgctggagaacctggaggactcctgcgtgctgactgggccagatgattccctgtgggacaagcacgcgtgcccagcctacgtgggacctgagatactcagctcacgggcctcatactcgggcaaggcagccgatgtctggagcctgggcgtggcgctcttcaccatgctggccggccactaccccttccaggactcggagcctgtcctgctcttcggcaagatccgccgcggggcctacgccttgcctgcaggcctctcggcccctgcccgctgtctggttcgctgcctccttcgtcgggagccagctgaacggctcacagccacaggcatcctcctgcacccctggctgcgacaggacccgatgcccttagccccaacccgatcccatctctgggaggctgcccaggtggtccctgatggactggggctggacgaagccagggaagaggagggagacagagaagtggttctgtatggctaggaccaccctactacacgctcagctgccaacagtggattgagtttgggggtagctccaagccttctcctgcctctgaactgagccaaaccttcagtgccttccagaagggagaaaggcagaagcctgtgtggagtgtgctgtgtacacatctgctttgttccacacacatgcagttcctgcttgggtgcttatcaggtgccaagccctgttctcggtgctgggagtacagcagtgagcaaaggagacaatattccctgctcacagagatgacaaactggcatccttgagctgacaacacttttccatgaccataggtcactgtctacactgggtacactttgtaccagtgtcggcctccactgatgctggtgctcaggcacctctgtccaaggacaatccctttcacaaacaaaccagctgcctttgtatcttgtaccttttcagagaaagggaggtatccctgtgccaaaggctccaggcctctcccctgcaactcaggacccaagcccagctcactctgggaactgtgttcccagcatctctgtcctcttgattaagagattctccttccaggcctaagcctgggatttgggccagagataagaatccaaactatgaggctagttcttgtctaactcaagactgttctggaatgagggtccaggcctgtcaaccatggggcttctgacctgagcaccaaggttgagggacaggattaggcagggtctgtcctgtggccacctggaaagtcccaggtgggactcttctggggacacttggggtccacaatcccaggtccatactctaggttttggataccatgagtatgtatgtttacctgtgcctaataaaggagaattatgaaataattttatttttctctgcaatttcttccatcctttccaacgatctcttaccagtttttcctgccttcaaaactggcccccatggtgaaaggccgtagagttgtgtcttaacctgggctgagtggtttgtgagaacagattacctggagcccagtgggtcttcctgcactccttctgtttcttctggcagcagcagtgtctctattagggtactttctgagtcaaaatggcttcaacaagatggaaatatgtttcacacaaaacaagaagtcagcagatagggtgggcttcagtgctggtccattcaactcccaaagctgcgcacagggaccccggctctccaggctccttctgtctcttggctgtattgtctcgagactgctggcccaatggctacagcaggtgtcacattaaagaggtccatgaccagaggaagaagccaggggtcattgtagtacctgagaactcagaactctggagtcaggctgcctggaattaaatcctggctccagcactcaatagctgtttgacccttggcaagtttcttaaccactctatgcctcagattcttcatctgtgaaatgggggacaatgatagtacctaacttatgagaactaaatgacttattttgtataaagcaattagaacaagcagcgcctggcataataagcccacaataaaagttactcccggctgggcacggtggctcacgcctgtaatcccagcactttgggaggccgaggtgggcagatcacaaggtcaggagttcaagaccaacctgaccaacatggtgaaaccccgtctctactaaaaatacaaaaatttttagtagagacggggcgtggtggtgcgtgcctgtagtcccagctactcgggaggctgaggcaggagaattgcttgaacccgggaggtggacgttgcagtgagccaagatcccgccactgcactcagcctgggcaagagagcgagactccgtctcgaaaaaaaaaaaaatggtgctcccacatttctttcttgggatggaggaagctttcccagaagcgctcctgaccgactttcccacacatctcactggtcagaactgcatcacttgccgtttctgaccaatcaccagcttacattcatggggcacgtgcttacactaaccatggcactcctcgagctaagtggagctcatgcgtcatatggaggggtagtgactcctgagcaaaaccaggttcaaagagggaggggatcgtagggaaaagaatgtgcggaagtgcggaggcccagccaacagcctgctaactgcagatactcgagagcggccaccctagatcatctgacccaggctggcccacgctagaattgcccagtgacccgcaaggtcatgagctaattgagctaaataaaatcattgtgtttttttgtttgtttgttttgtttttgttgttttgttttttgagacagagtctcactctgtcacccaggctggagtgcagtggtgcgatcttggctcactgcaacctctgcctcccgggttttcaaacgattcttctgcttctgcctcagcctcccgagtagctgggattacaggcacgcgccactacacccggctaatttttatatttttagtagagacgggggtttcgccatgttggccaggctggtctccaactcctgacctcaggtgataggcccacctcggccacccaaagtgctggtattacaggcgtgagccgccgcacccggccaatcattgtggttttaagtcactaagtttgaggctattttgttttacagcaaaagctaactgatgcagacagggacaagtcagtctcatctctgtgcacccagcattgcccagaacagggcctagttgtgtctagggtctcatggggcagcccctgacctctatcttgcccctcccagcttccaacagaccctgtcccagctccctccaagctgagtgttggcctgatacctaccagtggagcgaggggaacacgaggactgccaagggcaggtaccgtgccaacccttcactccattccacaaagagactcatttactcctcatgacaatccagtgaggcagatgttcctgtcactttacagataagacaaatgagctttagagagagcagaagactcatccaagacctcacaacagagaaaaagactcctctggtttttgccttggagcaggaacttttgacaaggctgcgcagatgcagccacatgaaaaccgcccattaaaaatgtaatatcggcccggagcgggggctcacgcctgtaatcccagcactttgggaggccgaggcaggcagatcacttgaggtcaggagttgaagaccagcctggccaacatggtgaaaccccgtctctactaaaaatacaaaaaatagccaggcgtggtggcatgggcctgtaatcccagctactcgggaggctgaggcaggagaatcacttgaacccaggaggcagagattgcagtgagtcaagattgcaccactgcactccagcctgagcgacagagcaagactctgtctcaaaataataataaaatgtaatattcactcttatcaaataatggatgtcaccacaccccgaccctaattagtgaggactttcatgttctacttgtcttcatttaatcatcattgtataagagttttacaatatcaaattagtagatgtatattactgaaagggaaggactgttagaaatttacttgaggaatgtctgccactgggggctgaacacaaaagatcctattgtgacctgccagattattcattcacttagcaattcaacaaccatcgctgaatgcctactataggccaggtgccatgcaagacagatgtgctcccaccctcaagggttcacagtctaatagaggagagagatgttaaacagataactgtacagatggcatagctaattatattcgtggaagttcgttgtggcaaagacaggcatctcaatatttcaggagctcccctatattttctagcctcccttacagtcacatgactagttctgaccagtggggtgtgtgtaggagtggcaggctgaagcaatggagagctggtgagcctcatccctctcttcccctgccacagccaccttgcgcccacaagttcccttagctacaagctggaggagagccaccagatccaccttagatttcactgagcaagaaataaagcttcttgtgttaagtctttcagatttggagtttgtctggtagatagtgttaattaccatgactaaggaaaatttgccattagtgaagggaggaaaaatattctccaccagtaacaaggccatgtcagtctgctgcattataaaccccaaacagtagtttatgatcctctgggctggcaatttgggctgaattcagctgggtcactcctgcagctgcaggcagcaagcagctcgaatgtctaccttgccaggaaggctcttctctgctccacatggcctcgtcctccaataggcatagcctactccttcctatggtggtctcagggtttcagaaagcaacaagagaggacaaattccagtgttcaagctgcactagtgtcaaagcatatcaaatagcatgtcaaattccacatcaaattcaggatgcaggcaaattgattctttctcttgatgggaagagctgaaaataatgtgtggtcttgtttttcaatgtacagtggtcccatttatccaggggggatacattccaagacccccagtggatgcctgaaaccacagatagtacagaattctgtatataccatgttttttactatacatacatacctacgataaggtttaatttgtaaattaaactcttacaaattaagagttaacaacagctgggcacagtggctcacgcctgtaatcccagcactttgggaggccgaggtgggcggatcacgaggtcaagagatcgagaccatcatgaccaacatggtgaaactccgtctctactaaaaatacaaaaattatctgggtgtagtggcgcatgcctgtaatcccagctacttgggaggctgaggcaggagaatcatttgaacccgggaggcggaggttgcagtgagctgagatcgcgccactgcactccagcctggtgacagagcgagactccacctcaaaaaaaaaaaaaaaacaaaaaaaacaaacagttaacaataaatagaacagttataacagtatgttgtaataaaagttatgcgaatgtggtctctccctcaaaatgtcctattgtactgtactcacccttcttgtgatgatgggagataataaaatgcctacatgatgagatgaaggtaaatgaatgacatgggcattgtgatctagcgttagactactactcacctgatgatacgtcagaaggagaatcatctcctttgggtgatccaggatcatgaagccgtgacaatgtccatgattggatgtcaggagcagatgatgttaatgattaaccgtgggtaatgtctacaatatggatacagtgcaaaagggatgattcacatcctacgtggaatagtgcaggattgcatgagatttcatcatgtggttggctgcaggtaactgacattgcagaaagcaaaaccacagatcatgggggtgggggtggggaactactgtacaacatgagatatatttgatcaaataagatgaggtgcacctaaaactttccctacaggttgtatgcccctgagtaaattgcttggtgtctctggatctccagctgttccccttctctctgcatggctaagccctgtccgtcacttggggctggacctagagccctgcctggccactaagccctcagaacagggtttcttttttaaaaaagacagggtcgggaggtggaggttgcaatgagccaaggtcgcaccattgcactccagcctgggtgacaagagtgaaactccatctcaaaaaaaaaaaaaaaaaaaaaaaaaaaaaaaaaaaaagacagggtctcactctgtcacccaggctggagtacagtggtgtgatcatggctcgctgcagccttgaacacctgggctcaagctgtcccccaacctcagcttcctgagtagctgggagtgccaccacgcctagctagttttttaaaaaattgttttgtagagacaggggcctcactattttgcccaggctggtcttgaatgcctggcctcaaatgatcctcctgccttggcctcccaaagcactggggttacaggtatgaccactacccacaaccagaacatttctcaaatgtgattggttgatctcctgcatccatccctggggtgcttgtttaaaatgcagagccctggatcctcccccaacctagagagtcagaacatctgggcttctgcatcttaacaagctccctgggtgatgctgctgggcctccaagttggagaacctctgtatttgaagaaatccggactccttggggactcaaatcttatttcagctcttctctggactagtttgactttagccttggtgtaaaatgggtatacattttacacgcctgtgacgccaggatgcgctcacaggggagggagggctttatcagaggtcagaatctaagccaccactacagttgtactagatccaaggagaaagactcccaggcctcatttcctcatcgttctctcttctcttacctggctttatggttcttcatagcactgagcaccaccaggcagtgtattttatgttttttttgagctttataatgccagggactatgttttgtttataactgttcacccagttcctagaacagtgcctggtacacaggagtgctcaataaatgtttgtggaatgactgaataaaagttgttcctgtacagattccacctgcctagagcaaagccaggacactgattgggatgaacacatagcacatgccagacatggctttgagtgctttacctggatcatctcactttatatgtgacagccaaatggtccccagtgaccttcaccagctgctattcacgcctttgtacagtttcctcccatcctaagctgggctgaccagtgtaatgaatacaatattgtgaaatgagaaagtatgacttttaagattaggtcataaaatatgttatggcttctgccttgctcttctggatcatctgctctggggacagccagctgccatgttgcgaggacactcaattacccctgtggaaacttacatgtggtgaggatcgtaggcattctgcaaataaccagcaccacccaggcacataaaagagctttcttgagtcaatcctccagccccagtcaagccttcagatgactgcagccccagccgacatcttaactacaacctcatgagtgaccctgagccagaaccatctatgtagctgctccccagttcctaacccacagaaactatgtgatagcatacatgttgattgcttttttaagcaattaattttgggaaatttgccacatatcaataattaataacttgtacagattctcacaacagcctatgtgggaggagccatcataattaccattgaacagagaaagaaactgaggcccagatagggggaatctttgtccagggtcacacagatagtgaactgtagcactgagattggaacccaagtttgaatgactagagtctacccactgaggtgaaggtgttcaagttgaatgccagctcttcccctgaagggccaaggctgagaccagaaaacctgaaacaatatagctgcacccaatataaatatatgcaggtaactcagggctgatggtacatgaccataataaatcagcagggtcatcaggagaaaacaagacaacaggagcgaaaacagatagaaacaaatatgcccagagtttgtatatcagtattatcagacgcagattataaaacaaaatgttggccgggcacgggggctcatgcctgtaatcccagcactttgggaggccaaggcgcatggatcacctgaggtcaagagttcaagaccagcctgaccaacatggggaaaccccgtctcaaataaaaatacaaaaaaattagctgggcctggtggcaggctcctgtaatcccaggtacttcaggaggctgaggtaggagaatcgcttgtacccgggagggagaggttgcagtgagctgagatcgcaccatctcactccagcctgggcaacaagagcgaaactctgtctaaaaaaaaaaaaagtttactgcgtttaaataaataaataacctagaaacattgccaaagtatagaaaattatatcacatgacaacaaattttaaaataacctaacagaacttctaaaataaaataatacaataatcaaaatttttaggccaggcacagtggctcacacctgtaatcccagcactttgggaagccgaagtgggtggatcacttgaggtcaggagttcgagaccagcctggccaacatggtgaaaccctgtctctactaaaaatacaaaaaattagccaggagtggtggcagacacctgtaatcccagctactcaggaggctgaggcaggagaatcacctgaacccgggaggcagaggttgcagtgagctaagatcgtgccatttgcactccagcctgggcaacaagagtgaaactctgtcacacacacacacacacacacacacacacacaaattaaatttaaaagatgggctaaacagcaaactagatatggctaaagagggaattagtgagacagaaatcagacaccaatcacagattcaagaaactccataaattttacacatagacacatcatagtaaaagtgcaaaaagccaaagattttttttaaaaaactcttaaaagcactcagaggaaaagaatcagagattctaaaaacaaaaaacaaaacaaaacaaaaaaaccccaaaacaacaacaacaaaaaacaaacaaaaaaccagtactacaacatggataaacctcaaaaacgttatgtcaagaaaaaccccaaagttatgccaagtgaaagaagccagtcacaaaggttcacatattgtcaaaatctaattttctttttgagacagggtctcactctgtcacccaggctggagtgcagtgggacgatcactgctctacaggtgcacgccatcacactcggctaatttttgtattttttgtagagatggggtttcaccatgttgcccaggctggtcttgaattcctgggctcaagcgatccacctggcttggcctccccaagtgctgggattactggcatgagccactgtggcccatcagtaagatctaatttctataaaatatcaagaagaggaaagtctatagagacataaagtatattagtgctgtcagttggaggatgggaaacagggaatgtctgctaatgagtacaggtctattttggggtgataagaatgttctttctttctttttttttttttggtctgagacagagtctcgctctatcacgcaggctggagtacaacggtgcgatctcagctcactgcaacctctgcctcccaggttcaagccattctcatgcctcaggctctgcagtagctaggattacagatgtccgccaccacacctggctaatttttgtatttttagtagagacagggtttcaccatgttggccaggctggtctcgaactcctgacctcaagtgatccgcccacctcggcctctcaaagtgctgggattgtaggtgtgagccaccatgctcagccaaaaatgtcctaaaatttgattgtgatgatgggtgtacaattctgtaaatgttactaaaaactattgaattgtatattttaggtgggtggattttatggcatataaattatatctcaataaagctgtttataaaaagaacagcagttagattgacaggtgatgatatctcaataaagctgtttataaaaagaacagcagttagattgacaggtgatgatatctcaacagcaaccatttcccagcattttgggaggccgaggtgggcagatcatttgagcccaggagttcaagaccagcctgggcaacatgaccaaaccctgtctctacaaaaattagccagctgtggtggcacgtgcccgtggtttgcagctactcgggaagctgagcccaggagttggaggctgtagtgagccatgatcacgccactgcactccagcctgggcaacaagagtgaaactccatctcaaaaaaaaaaaaaaaaaaaaaaaaggcttccccaggccattcaaatgtacagccaaagttaagaaacattgtctaaagggatgtgtttccggcaaaagaaaaattatcccagatgaaggtctgaggttcattccttcattcaacatatggagcctccattatgtgtttggaactgttctagacaccaggaacacagcagtgagcaaaacaaaccaaagtccctgccctctaggagaggaaaacagacccagaataacataaataagtaaaacatgctccgttagacagtaatagatgctgagaagaaaaaatgaagccaggaaagcggatgtgaaatgctggatacgtgtgtctgtgaaatttcagatggagtaactagggaagatttttgggtaaagaccaaaataaagggaaggagggagccatgcagacgtttgggttatggcaggtgcaaaggccttagggcgggagtgtgtctgacttactccaggacccagcaggtcaatgggacttgagtggaatgaggcaggggcagggcagtcagctacgaagacagagatcgggaggcaatttgcgagccctgggacagatctcggattttgctttaagtgagatgggagtacttgggtcggggagtggcatgggtttgatttacattttaacaggactctccggcagctaggtggaaatggacggtagggggcaaaaagagaagcaaggaggcccaggaggaggctggttcaagacccctgagatgatggagcactgatggagctggagcgggatggggccggaggaggtgagggatgagattctgcaagtggagcccgcaggatctgctgatcgatgggacgaggaacgggagaaaaattaaagcggcgcatgaggcagacgaatgcaaacttcaccaatagctcaacgaaaagacagacggtgaccgctgagaggcagcgtcggatctgggtaagggcgggttcctgagcctgccaggcctggattcaaacctcggctgagtggccttggacaggtcatcaacaaacagagccttcgtttattcatgtgcaaacggggccaaggaccgggcctgccccgaggtatgcctgaggcttgggtgagcaggcgccgggctcgcagggcgcgctcctaacccgtccccagcggctcgacgctgtggatcccgccgccctccagccccggctccggcgccgactcctgctcaggctcctgctcctgcccccggccccgcccccggccccggccccggcccccggcccaccccggccccgcccccagcccccggcccccccggccccgcccccggccccgccccggccccgcccaccccgcctgcggcccagctccttcccgcggctctgcgatgcggcccgcagggtgacccgggcgggagtccggggacccgcgatcagccccggaggacggggtggggtcgccccaaacaggagcgccgggaccgctgggaccccgcactcggcgtccgccgccgccgggtagccgggcagtggaggtcccggatgaggcgacaatttttccggccccccctcccagtcccgccccacttccggggccgccactttcactttctcttccgccgaagccgctccccttgcgaagaactggggcctcccgggaggagagagggctttgccttgaaacccgggacgccaggggcgctcccgcaagtgggggtcctccgggacttggaacgccccggctgggtggtgtccgggcgtcctttccccgcttcttcccacctcggctggtcccgtttcctcctgcgcccagtgcggacctgtctcggcgcccgctgccctctcaccgccccacgcaggatcccggcctggtcaccgggcagtgtgatgcttcccgactgccgcggggacagcgaggcacacacagggcttgggccgcgccggaggccacacggcctggctgagttgctcctggtctcccgcctctcccaggcgacccggaggtagcatttcccaggaggcacggtcccccccagggggatgggcacagccacgccagatggacgagaagaccaagaaaggtgggcacaggctggaggtggctggggaacttccggtgggaagtgggccccgcaggacctggccttgcccctggccagaagggccttggagagggggctttagcctgccctccctctaccctcctccccatcagtttcctcctttggtacctgctggcttccagagccatcttggggccctgagaactccttgggctggctctgtgctgagatggggctaggggactcgcagaggacacagggcattgaacttggagacctcctgggctggtgggagacagacgtcagttgacctgagaagcaggggtacttgcctcttctcttgtcccctgcacctagggttgtagaacggaagtcagtcactgccttgctggaaaccctcccatgcccctctgtgttctccaaacaaaacccagaggccctgggtggcccacaggatatctgtcctcagtcaccccgccatgctcactctactggagccccactggcttccttcggttctcatccaaccattttttggccaaggcccttactcttccttccacctggaccactcttccccactggagcttgacacgtgcagcttctcctccttcaggtcttagcttcagtgttaccccctcccagaggcctcccctggtctccttaacctgtttatttccctgccagcaaggatcgcaatctgactttttttttttttcttgttaaacttgttcattgtctccccactgggcagggagatccataaggagaggggccctgtttataaatctctgtgggattccagttcctgggacagtgggtggcacacagtagaagctcaataactgcttgttggataaatgaatagaaatatgagggaccctgggaatgggaaggacaaacaaccaaatgagcctagtgtgaggaggagtggggaatattagagaacccctcccggagaaagggacttttagtctgggtgctgaaggatacgtaggagttcaccaggaagacagagaaagcagcacacacaaaggatcgcctcctttcctaccccattactctcagctcctgaaaataaaccctgtgctaactggctcctgctgtactggctttcagcagaggaaatggccctgagcctcacccgagcagtggcgggcggggatgaacaggtggcaatgaagtgtgccatctggctggcagagcaacgggtgcccctgagtgtgcaactgaagcctgaggtctccccaacgcaggacatcaggtgaggagtgcatggctggcctgaacccaagggacagcaggacaggatattcttgcctgtagaacagttcttcctaatggcacgttctggcttcaggaggcctggcttctaaccctagttatgtcattaatcaactgtgaaatacagagcaggtcacttcacctctcagtgtgtcctcattttaaaaatcagaccgtaacagtagctatctcatagggttgttaggaggtgtactgtattaggatgttaggccttatacaacagaagaaaacggaacagtgacgtaaacaaatttgatggcagggagtccagatagggaggttctgctcccgacagtcctcagaggctcatattgtttctctcaccattctgccattcattcccagattcctcatggtgcaaaatggccattccagctccatccagccatcacatcacaggaggaagggaagaaagacacccctccacactcttctaaagagcatagctcaaaaattgtacacacttcttccgttaattcctgtggaccagaactgattcccacagctacagttcagcttgaggggagactgtatagccaagatattcagctagaattcaggggttcgcttggtaagggaagggaagagaatggatactgtcggtctgtgctccaggagacttaaactcaatgctgaaacactttgcacaatgcctggcgtgttatgcactcaataataaacattagtgtctatcgttattttttgactgctttttcattactggatagtaaggcaatagttttatggtttctgatttttggttctcttggtgggtcccatttggtttttcttaaaacagttttatttatttatttatccttacagttcgaccatttaaagtatacagttcaatggcttttagtatattcaaggttgtgcaaccattgccacaatcaattttagaacattttcatcatcctgtaaagaaacctggtactcattagcagccagtcctcatctctctaccttttccctaactccccaaccttaggcaaccactaatctactttttatctctagggatctaccttctggaaattccatataagttgaatcatgcaatatgtggccttttgtatctggcttctttcacttaggatcgttttcgagattcatccatgttgtagcatgtctaacaacttcattcccctttttttttttgacatggggtctcttgtctaggttgaagtgcagtggtgccatcatcgctcactacagcctcaacttcctggattcaagcagtcctcctgccttggcctcccaggtagctgggactactggcatgtaccaccacacccggctaattttttttttctttgagatgggagtctcactctgtcccccaggctggagtgcagtggcgcgatctcagctcactgcaagctccacctcccaggttcacgccattctcctgcctcagcttcccgagtagctgggactacaggcgcccgccaccacgcccagctaattttttgtatttttagtagagacggggtttcgccgtgttaaccaggatggtctccatctcctgacctcgtgatccgcccgcctatgcctcccaatgtgctgggactacaggcgtgagccaccacacccagccacacctggctaatttttagaaagtctgtagagataaggtcttgctttgttgtctgggctggtcttgaacttctggcttaagcagtcttcccacctcagcctctcaaagtgctgggattacaggtgtgagccaccatgcccaaccagaactttattcctttttattgccaaataataatctattgtatagacatatctcattatctttactcattaaatcagttgatggacatttgggtgtttctattttttggctattataaacaatgctgccgtgaacatttgtgtccaactttttgtgtggacacgttttcatttctcttggatacacactagcagtggaattgctgggtcatacagtaactctatgttactttttgaagaaatgccagacagttttccaaagtggctgcaccattttacattcccaccagcatatatgagggttctagtttctccacatcatctctaatacttgttgttgtttatctttttgattatagccatcctagtaagtttgaagaggtatctcactgtggttttgatttgcaatttcctaaccatttgatgacaaatgatgttaagcatcttttcatgcacatattttctttggaggtttgcctattcaggtcttttgcccattttaaaattgggtttatctttttttttttttgagatggagtctcgctctgtcacccaagcaggagtgcaatggtgcaatctcggctcactgcaacctccgcctcccaggttcaagtgattctcctgccccagcctcctgagtagctggattacaggtgcccaccactacactggctaatttttgtatttttagtagagacgggtcttaccatgttggccaggctggtcttgaactcctgacctcaggtgatccacccaccttggcctttccaaagtgttgggattacaggcatgagccactgcacccggctgggtttatgtttttatattgagttgtaggagtactttattcattttagctagaagtactttattcattttagcttatcagctacatgatttgcaaaaattttctctcattctgtggattgtcttctcactttgttgatggtatcctttgaaccacaaaagttttaaattttgatgatgtccagttagtctatgttttattttgttgtttgtgcttttggtgtcatatctaagaaatcgttgcctcatccaaggtcatgaagatttacctctatattttcttctaaagattttatggttttagctcttacatttaggtctttggtccattttgatttaatttttatataaggtgtgaggtaagggtccagcttcattcttttgcacgtggatattgagttgtgccggcactatttgttaaggctgttttcctctgtttaatcatcttaaccctttttggaaattaattgaccataaatgtgagtgcttatttctggactctcatttctataccattgaactataatatatatctgcccttacgccagtaccacactaattactatagcttcatagtatttgaaatcaggaaatacaagttctccaacttttgttctttttcaatattgttttggttattgcaagtctcttgaatttccatataaattttacgatcagcttgtctgtttctgcaaaaaaaaaacaacaacaactgggaattttggtagggatttcattgaatctgtagatcattggccacttgattttaaacaaaatattgagatatctacttcttgaaatgattgcttgagacagtacctgtgtactccttgctatgaaaaatgaggaagttaacatactcatcttccacctttccttttccttactttttttgttgaagtatcattgtggacactttcccagttgacttccacttgatcccctgaattaactaactggcactggcgtttcctttgtaaaatgtacaatgtcagccaccatcttgctactaaagtgtggcctgtggaccacaacatggggggaatctcaggtctcacctcagacttgctgggtcagaacctgagttttgagaggctctgggcaaccggcacctctcagacctgctgttgggttctcatcgatggacccgatgcttcctagcaaatgatacctgttgtatgtgttattggtaataacatagtttacttagctattacattaattaataaaacatgagcgctgaaagagttgtttctgtgaaaataagctgattgctttaaaaagataagagacaaatcaccaaaaaaaaaaaaaaaaaagattaacacttttgggtgagacagtagtaaggaaatacagtaaaaatccagaagggctctgtgctctgatgcttcaggagtgtgtctaagttcttgctcgctttaaagaagctgctactagaaattatagatcatgattatcgatgtggttcatacaaaaaaaaaaaagaaaaatccctgggaaactccaatgagcaggtataaactcacgctgggcatggcggctcagcactttggaaggctcaggcaggagaatggcttgaactcgagtttaagaccagcctgggcaacatagtgagaccttgtctctgcaaaaaataaaaaaaattagccaggctgggtggcacacacctgtagtcccagctatttgagaggctgagatgagaggattattagaccctgggtggttgaggttgcagtgagccatgatcatgcctgagtgacaaggtgaaaccctgtctcaaagaaagaaagagagaaaagccattggctgtacacctagagactggccagtgaatatgcatttatagtatgtaagttaaaattaagtgtttaagctttgtctgcagctgtttttgtgattctctgctgttcaccagcgatcctgatgtcacattggatgagagagctccagctgtatttttttgttgatagtgttaagattatagctttaaaaaattttgttttctaacataattaaggcctttatgctttgcctctaggttgattctaaaagtgtaacactactagaaaggatttatagtattttgattatggaaatattattcactatagaataactagtgcagttgaaaccatatgcacttttatgtttcaaaacccttattgctggaagaacattttggggttaagatccagtccttttcattttttacttttcttctattctcctgtatcagactcatctatttttgtttttcaagaacttttcacgtggaaaatgtggtaaacttttagagtctttgcatgtttaaaaatttctatattttgctctgtcaattcattgatagttgactgggtattcaaattgtttacctgaagaattttgagagcattttctggactgcttttaaataaatttcagatattattttatccttaaatactttagtatgtgtcttcaaaaaattaggacttggcggggcacgatggatgatgcttgtaatcctagcactttgggaggctgaggcaggtggactgcttgaacccatgagttcaaaaccagcctgggcaacatagtgaaaccttgtctctacaaaacattagctaggcatggtggtgcgcccatctagtcccagctacccaggaggctgaggtgggagggtcacctcagtccaggagattgaagctgcagtgagccaagatcatgccactacactccatcctgggtgacagaagtgagaccctgtctcaaaaaaaacaaaaacaaacaaaacccctcaatactattatcacaccttagaaaaggaataagaattccttaaaatccgctaatgccctgtttatattcacattttcctatttcattagtgctttttacaattggtttcttcaaatcaggagccaaacaagatctacatgtagcatttcttactatgtcttaagtcccttttactctcctctatttttatgccactagttttttttttaagaaacctggtcttttgacctctagaattttccccatattctggatctatccattacctcttcatggtatgtattagaccactctagcattgctacaaagaaatatctgagactgggtaatttgtaaagaaaagaggtttaattgactcagttctgcaggtggtgtaggaagcatggtcctgacatttgcttggcttctggggaggcctcagtgaacttttactgaagcgggagcaggcacttcacatggtgagagagggagcaagagagagagttggtggggaggtgccacactttacaacagccagatctcacgaggactcactatggcgagaagtcactacagtgagcgcagcaccaggctgtgagggagctgcccctatgacccaaacacctcccaccaggcctcaccttcaacactgaggattacagttcaaggtaagatttgggcagggacaaatacccagactatcatggtgtcatttactatctcccgtttttcctgtaactggtagttagagataaagtttcaattagtcagcagtcactttttttttttttttttttgagacagagtttcactctgttgcccaggctggagtgcggtggcgcaatcttggctcactgcacggtccgcctcccgggttcacaccattctcctgcctcaatctcctgagtagctgggactacaggcgcccgccaccgtgcctggctaatttttttttttgtatttttagtagagacgggttttcaccgtgttagccaggatggtctcgatctcctgacctcgtgatccacccacctcggcctcccaaagtgctgggattcagcagtcacttttaatgtgcaggaactcttcctcattttttggttgcttcatgcctttccttgctttctgaatgcagtgttttcccaaatctctctgaaggtactagttagacttcactgttgcttattgttccataccctaaatgatctctgtttcctttggggtcggttctgttttttcatcttttcatgcttttgattttccaaacatgttggaggatcctcaagaaagttaaaaccactttctctggaataataccatgtagatttaaatcctgcctctggctgaacacagtggcttactcctgtaatcccacttcgggaggccaaggcaggaggatcacttgaggccaagagttcaagaccagctttggcaacatagtgagaccctgtctctacaaaaacttaaaaaattagccaggcatggtggcatgagcctgtggtcccagctacttgggaggctgagatgggaagagcccaggaggttgatactgcagtgagccaaggtagcactactgcactccagcctgggccacagaaagagagcctgtgtcttaaaattaaatcaagacatacaaatgaatcctgcctctaacagttattagttgcttagtttggcagagtcactggaacctatctgtgcctcacatttttatctgtaaaacagggatacagcagtacctgtctgatgggttggttgagaggattaaatgagttaatacacatgaagtgcattaaatagtcttagcacgtagttaacaacaacttctggtggtttcactaaggagcaggggagagaagacagaagaggttggagaggtcagggaggtgccagatcatggaggccctcgtgtgctgccacgagttgattctaagagtagcgtggagccattggaggggcctaactggtgggttctaataaaggaagaagcatgggtggggcctaccccagactggggtttgtgtgtgtgtgtgtgtgtgtgtgtgtgcatggccatgtgcctgtgtgcaaatatgtacatgtctgtagccggtggctgaggctggacccctggccagagcccatgctgagcccctgctgttctctgcaggctgtgggtgagcgtggaggatgctcagatgcacaccgtcaccatctggctcacagtgcgccctgatatgacagtggcgtctctcaaggacatggtgagtgaggaggcggagggcgacactggggtgaaggctctccctttcactcctgcttcctctctctcctctggccctcccttcccactctccctctctttgcccccaccaggtttttctggactatggcttcccaccagtcttgcagcagtgggtgattgggcagcggctggcacgagaccaggagaccctgcactcccatggggtgcggcagaatggggacagtgcctacctctatctgctgtcagcccgcaacacctccctcaaccctcaggagctgcagcgggagcggcagctgcggatgctggaaggtgaggctctgccctgagcaccgccggacccagcgggggccctggactcacttgagggcatagggcaagcaggggcagagcccctgggtttttagtcagggactcacccagaggaccctatccaagtggggaagagaggacctaagacacatgggagggagcatttcagggacccatcatgagaacagctggcacggggaggggtggactccgtccaggctccggcattcccagctgtgtgaccttgggcaaggttgctcctatctgctgcccagtttgctaaaatcataaattgggtatgacagtgatcgtgataactagtgtttattcttaatttttaacttctgaaatgtttcagacctacagaaaagttgctaaattttacaaagtagtacataaagaattcccatgtacctttcatgtgggttttaccacatgtgctttctttttttttttgagacggagtctcgctctgtcgcccaggctggagtgcagtggcacaatctcggctcactgcaagctccgactcccgggttcacgccattctcctgcctcagcctccggagtagctgggactacaggcgcccgccaccacgcccggctaattttttatatttttagtagagacggggtttcaccgtgttagccaggatggtctcgatctcctgactttgtgatccgcccgcctcggcctcccaaagtgctgggattacaggcgtgagccaccacgcccaacccacatttgctttcttttatcattctctttctatataaaattattttttttctgaaccattttgagagtaagttgcagacatgatgtctctttcccctaaataattcagtgtgcatttccttgaaaagaaaggtcattttcttacattactgggtataacaatccaactcaggaaactaacgctgatacagtactggtatccagtctacagatcttactcagattttaccagttgtcccactattgtcatttatagcaaaagacttggcattctgctgtcatgtctcagtccctttcaaagagtccaggccagtttcttttttttggcgggggttgggggctgatgtttcctccggagtggatcaagtcactgttttggcaggaccgcctcagcggtgctcttgggtccctcttggtgcatccttcaggaggcacggaagggctggtgttgtgctgggttttgaagctcaaaggacatagaagcatttatcggtggaatagggaccctgaccctgggggagccaggatgcccacttggccagatggaagctggaggtacccccagggaggagggagaggatagggggagggtctgcctggctggctcagggagacccacccccatgggtgtggaccaagtgggccgcgtggaaccaccaccctttaaccctcctccacagatctgggcttcaaggacctcacgctgcagccgcggggccctctggagccaggccccccaaagcccggggtcccccaggaacccggacgggggcagccagatgcagtgcctgagcccccaccggtaagctgtccttggcctcagtatcctcttctgtgcccctcccttgcctcaccctgcccagtcgggctcacagcaccctctgctcccaggtgggctggcagtgccccgggtgcaccttcatcaacaagcccacgcggcctggctgtgagatgtgctgccgggcgcgccccgaggcctaccaggtccccgcctcataccagcccgacgaggaggagcgagcgcgcctggcgggcgaggaggaggcgctgcgtcagtaccagcaggtgggcgggaaagtccctggacagacacctgcagaccgcacgggggaggtgtaggccaggaagggagacacctgcgcactgccgcgcctctccgttactgccttgcccctcccaaccatgctgctggcagtgaccctgcacctggctgtgaccctgcacctggctgtgacctgccctctctcaaaggtcaccctgtggctgagacccgctccctggctgtggcgcacatccaggttcacatgccccactcccacgtgggctgtggctccatccccagctttgacacaccacacgagtatggctggccatgaccccagcaccctagccatgaccccagcaccctagccatgaccacacctcagctcggacctcacccccacccgtctgtgacctaagcctgctccacctcgccgtgacctcaccctggactctcctactcctgacctcttccctctcgggctgggcccacccctgacttcctgagagcctggcctggaccctcgctgcgccctagggggatgacccccgaccccggtcctacgccttagccctaccccgcccccatcgtgacacacgcactaatgacacagacattgatccccgagtgctccccattctgatctcacccctggccccacctgcattccccttggacccggtgctgcccctggccaccccactcctgttcccgtctcagctcctcggcttcgtcacttccccacccctgacgttgagtggctccaccagccctggcccgggccctgccctgctacctgactcaccactcagaccccggcccccttccttaccttgctgccattgctgtctcacctggcgccttccgtggctacctggccggcctcccctcccttggcttccccacctccacctggcctcactcccagccccgcccctcccaacctgcctgctcctgcccatcccccaccccccaccccccatcccccagccccacccccatcccccacccccgtcccccatcccccatccctactggctcccagctttgcctgtggctggtctgacccagccctgaccacgccccctggcccttcccccttcggggtctgacccgcccccgaggccctgacccgccccgtggccccgccccgtgtgcccagcggaagcagcagcagcaggaggggaactacctgcagcacgtccagctggaccagaggagcctggtgctgaacacggagcccgccgagtgccccgtgtgctactcggtgctggcgcccggcgaggccgtggtgctgcgtgagtgtctgcacaccttctgcaggtgcggcccccagtcccacccccggcaatgcagcttaatcaaagccgccaattacgcagggctggacgtgggtggggccctgtgctctgatacctcattggacgcccgcgaaaacctacgaggtaggctccgtctccccatgttgcggacgaggaacctgagggaaagagaggcccagcgccttaccccaggcccacggctcatgagagaagcagcctagacgtgagcgcaggcgtggggggagactcccttcccctctacctttcgccgcccgggctcctgcagccacgctgctctcagcctcgctgtgggcatctgccagtttctgagtctcctgtcatggcccccccacccctgaatgtggggaacacagacccgctcaccacagcggacccttgtggagccgcccctgggtgacaggctccgtgcctgcctcctgcagcttacattccagcagagaggctgatgagaatcggataatcgctggttgatgtctttgtgaattgtgtcaaatgctacatacagtacattaagagacaacaggagtccttcccagagagggtggtctggaagcttccaaggaggtagccccagagcagggaccggaaggcctgctgtaggtgtggggtgtgggcctggcctgttggaggagactgaggaggtctcttggtggctggagcagagggatgaagggggtaatcagagcaggatagagaggtgttgggtacgtgagcagcagtgaggagttgggatttgttctgggtaggatgggagtcactggggagacatggctgctgttctgagatagactctaggggccagatggatgcagggagcccagcgaggaggctcctggagtcacccaggtgggggatgtggggcctggaccagagaatcagagcggcagtatggaggcagggtggaggccttggtgatgggttggtgagagggatgggaaggaaggagatattgaggagaagtccacctggggtgactgagtgaggcccctggggtcaggccttgccatgtgagggatggagtccccagtgaagggggttcctatgatcctaactcttttcccctcccctcccctagggagtgcctgcagggcaccatccgcaacagccaggaggcggaggtctcctgccccttcattgacaacacctactcgtgctcgggcaagctgctggagagggagatcaaggcggtaaggcctcagggtgggagacataccccaagtcccaactcctaaggaactgggccctgagcaggcagcagacatctttcttttctttcttttttttttttggagatggggtctcactatgttgtccaagctggtctcaaactcctgggcttaagcgatcattcatcctcagccccccagacatttttcaagagctttgtccatgtggggtgttgagaccccaagcagaaaaagaattgaggggagtagctagtcaagaaaccacatctatgaaggaaggacagcagagttgttaagaatcagggactcggctgggcgtggcagctcacacctgtaatcccagcactttgggaggatgaagtgggcagattgcttgaacccatgagttccagaccaacctgggcaacatggcaaaaaatattcaaaaaatagccaggcgcgggggcatgcgcctgtagtcctagctacttgggtggggtctgggatgagtgggctgaggtgggaggattgcttgagcctaggaagtaaggttgcagtgagctgtgattgtgccactgcactccagcctgggcaacagagtgagaccttgcctcaaaaaaagaaaaaaaaaattagtcagggaactctggagcctggtggcctgggtgtgtgaccacaagtcagatatttaacctctctatgcctctatctcatctctgttagagtcagagttacagcttctatttccaggattgcaaagattacagtagaggatatgtgtatagaattcatagtagtacatccaggcgcagtggctcattcctgtaatcccagcgctttgggaggccaaggcgggtggatcacctgaggtcgggaattcgagatcagcctgactaacatggagaaaccccatctctactaaaaatagaaaattagccgggtgtggtggcgcatgcctgtaatcccagctactcaggaggctgaggcaggggaatcgcttgaaccccggaggcggaggttgtggtgaactgagatcgcgccattgcactccagcctgggcaaccagagcgaaactccgtctgaaaatatatatatatatatttagagtagtgcttgtcacatagtaagcctttgttgttgttagcgcttactgtgtaacaaatcactgcaggctcaaaacaacagtcatttattcagctcataaatctgcaagttaggacagttggccctctgtatctgtgggtaccacactggagaattcagcaacggtggatagaacatattcttacaaaaaaaattacaataaaaaacaaatttaaaaaacaatacagcataaactatttgtataacatttatgttatattaggtattataaataatctacagatgatttaaagtgtatgggaggatgttggtaggttgtatgcaaatactgcactattttatataaggggtttgagcatccatggatttgggtatctgcaggggtcttggaaccaattctctggataccgagggatgactataatttgggctggacttacctggatggttcttctggtctgggcagggcctcgctgatttcacctgggcctggctggtgggtcagccgcggtggcctggtttataatggtctcatctgtgatgactgggatgactggggcctccttccacttcaatgtctcacccaccagcaggctgcccgggccttctcatgtcatggtggtctcaaggttccaagagcagccatggggagccccagtgcatgtgtactttctaagtctgctcatttctcacttgacactgtcccattggccaaagcaagtcccatgctcaagcacagagtccattgggaagggaccacccaaaagtgtggaatcggggagacagaaacaaattggagtcaccactccgccagtctgtcacagcgttatgtgtgtctgcatacgtgtgtgcttgccgctggcgctcttcatgaattcgttagcaggttctctgcctggctgctggtgatctcgagcaagttgtttcccttctgtgggactccatttccttatctgaaaagtggacagttgggcttgattcatggttttcaaactgctgggaaatgaccttcccagacttgggcactgtgggttcccaggccaaaacatggcagccgaggcccaaatgggagatccccacaaaacacatacacagacctcctctttatttctgtcccccctgcctctctcctatgcccctatttctcctgagaatgctcccaacttcaccaagtgtttatggagcccaagaggttctgcccctggggaaaagggggaggcagaagaggtagaactttgggagttcacagctctgatatcaggagcagccccatttttctctgttgtctctgggtggttgctgaggctccttcgctctggcctggagagacctcatgaccagtcattccatatgtccccagcacccatagccatttgcttagaggtttccctgtggagtccaccccagccaaggggcattatgctggggccaggttcatgccaaagggctgcatgaacttccctggagcccactggagttgatgtgagtctcagaaaatggtcaagtgtgacagagagaaggaggcagggatcagccaagtaatgtagtggaggttgtttttacaaaaacagaaaaatatgcctcaccacatagaaccagagcagaaatcagagagaaaatcacccacaaacccaggaaatcctccaattgcattttatcttatttccttcagtatctctgggcaaattttttttttttttcctttttgagatgaagtctcactctgtcatccaggctggagtgcaatggcgcgatctcagcccactgcaagctccgcctcccgggttcacgccattctcctgcctcagcctcccaagtagctgggactagaggcgcacaccgccatgcccagctaatttttgtattttcagtacagacgagttttcaccatgttggccaggctggtcttgaactcctgacctcaggtgatccacccacctcggcctcccaaagtgctaggattacaggcgtgagccaccgtgcccagccagatatgattttttaagtcaactttacttaagtatactttgcacacaataaaatgtactcattgtaagtatgcagtcaggtaaattttaacaaatgtaactctcgtaaccaccaaccactgttacatataacataggcatgatttctgcctcattgtaaccagcatggatacaatcgctttagcttttgttattttgctatagaatttttctaaagattattacaaatctcaatagcacatatactgtttatacctcttagttctagtttctcagtttgtaatactccttcaaggaatgttttgcatggtgtattcttttttttttttttttttgagacgaagtctcactctgttgcctaagctggagtacattggtgtgatcttggctcactgcaacctccacctcccgggttcaaacgattctcctgcctcagcctcccgagtagctgggactacaggcagatgccaccacacccagctaatttttgtatttttagtagagatggggtttcactatgttggccaagctagtcttaaactcctgacctcgtgatgcgcccgcctcggcctcccagagtgttcagattacaggcgtgatccatcattcctggctggtgcatcttatatattattttcttgggataaagttaaagaagtgggatgggtaccaaagggtcagaaaagtttgggatggttgaaacgttattgccacattgctttctcagtgctacgtactagcttactagtttgtttaatttttattttttatttttgcgggtacatagttggtgtatatatttctggggtacatgaaatactttgatacaggcatgcaatgcgtaataatcacatcatggagaatggggaatccatcccctcaagcatttatcctttgtgttacagacaatccagttaacctctcttagttattataaaatgtacaattaaattattggctacagtctgttgtgctatcaaatactaggtcttactctatttttttgtaccaatttgccatccccactcccctgccacgcctcactaccctttgcagcctctggtaagcatccttttactgtctgtcctcattagttcagttgtttcgatttttagcacctgcaaataagtgagaacatgtaatgtttgtttgtctgtgcctggcttatttcatttaacataatgacctccagttcttccatgttgctgtaaatggcaggattgcattcttttttgtggccgaatagtactccattgtatatatgtgccacgttttctttataggatactagtttaatcatgtctttcccaacattgcttattatttatgttcttttctttattgtgagaaaatagacataacatttaccattttaaccagtttttagtatacagttcagtggcattaagtacattcacactgttgtgcaaccatcaccaccatccacctccagaacttttagaaattccccccactttctttcactttctttttacttttcttttccttttttttttttttttttttttttttttagctaggatttcattctgtcacccaggttggagtgcagtgcatcagtcatggctcactgcatccttgaccttctgggctcaagcgatcctcacaacccagcctcccaagcagctgggactacaggtgtgagcaccacacctggttattttattttttaaaaaaattttttggtagagatgaggtctcactgtatttctcaggctggtctgaaactcttggcctcaaggaatcctcctgccttgactgacctcccaaagtgctgggattacaagtgtaagccaccacacctggcctaaaatccactctttgaatggagtttttcaacactatgaggattacatgaagaaaagagcctggggctgggttggagtttctgggctgggggctttctggagggtatttagtggtcaagggtcatatgtcaggtgttctgaatcctgagcagcaaggacatggtgtgttggcagctcctgacccctgaggattaccagcgatttctagacctgggcatctccattgctgaaaaccgcagtgccttcagctaccattgcaagaccccagattgcaagggatggtgcttctttgaggatgatgtcaatgagttcacctgccctgtgtgtttccacgtcaactgcctgctctgcaaggtggggcctgcagggactccccccacctagtcactgtcatcttgcctggagctcaccacactgcagtgcgtgttctcctgggaagggagctgtgacactggcctgctggtcatgacttagagctacatgtcagtgggagagtgtggcttgagcctgaactgagccctggccccacagacggagtcccagccccagccccagatggagcctcaaacctaggcagccctggttcacaatggagccccgaccctgggccagtctgaccccagtcacagactgaatcccagtcccacattgagccctgatcccatccaagtccatagacttggcctctgaccaaacctgaccctgcacttgtcacttaaggtggtcccatattcagctcagaccctgaaccgagctctgaccctggcttctgactgaatctgtgacagactaaggcctgaccctggccctataccacgtctccacccgtgtcctcaactgagtgctgaccccaaacctagacagccctacctgatccttcccccaggcctgtccccgccgcttcatctcaaaagttgaaggtgaggagccggtaaacaggtctggagcctggtctcagactcagcctgagcaagctcagtctggggtcattgggcctgtaaccccgggcaggcccttgttagggatgcagggtctcaccctaggggtataagggatttctgtgcccatcagaacttaaataagctgggtgtggcagcacatgtcagtggtcccagctactcaggaggctgaggtatattttgctgttagcatatgtgatgaccttgacttcacctccctggcgccaatatcctcttctgtaaaatggcttatgcattacaaagtgaggtcctgccagtgactacacctagaggcattaagtgcctttgtggactcctgccctgcacctcacctctcccagcttcttaaccccctgaggaaccttcttaccttgagtccctcacccgctacaggccatccatgagcagatgaactgcaaggagtatcaggaggacctggccctgcgggctcagaacgatgtggctgcccggcagacgacagagatgctgaaggtgaggctgggacagggccgaggcctagggattttaagttctgggatccaggtgggggctgggggcttcccagtaagggctgtgctcacacatccctggaggctctgacctcccttctggctgtcactcccatccggaggtgggacttaggccgaatggtcatgtcaggaagagcgtctgggtggagggtggagaccacaggaatgaagagggggttgctggatggagcctggcctggcagagccacacaggagagactccacagctctagagggtcaccaccttctccctgccatggggaggggccaggctgggtgactgccccagccccgccccagggccagcacctgccccactccaggtgatgctgcagcagggcgaggccatgcgctgcccccagtgccagatcgtggtacagaagaaggacggctgcgactggatccgctgcaccgtctgccacaccgagatctgctgggtcaccaagggcccacgctggggccctggggtgagtctttgctcgtggtggtgtggagagggtgcccttgtgggctttgccttagaggagggctgggaaaactacagcccatgggccatatccaacccagcacctgaatttgtacagctcccgaggtaagaatttttttttttttttttgaaacggagtttcactcttgttgcccaggctggagtgcaatagcacaatctcagctcactgcaacctctgccttccgggttcaagcaattctcctgcctcagcctcccaagtagctgggattacaggcatgcgccaccacgcccggctagttttgtatttttaggagagacggggtttctccatgttggtcagactggtctcaaattcccgaccgcaggtgatccacctgcctcggcctcccaaagtgctaggattacaggcgtgagccaccgggccgcaagaatgttctttacatctttaaatggttgaaaaaataccagaagatgactattttgtgacgtgaaaattacatgaaatccacgtttcagtgtccgtaggtaaagtgctttggagcacagccgtgttcattcattcacatgttggctgtggttgcttttacactacagaggcagaggccgtatggctgcccggcccaaaatgactggccctttgcagaaaaggtttgcccactcctgccctagaggacagcaagtaaaggttcgatctggagtcagaggtggattggcccctggctctggcacatactgactgtgtgattaggctgcctgccactcacctctgtcagccccatttcctctgtgaaatggagatgatagctgggcttatctcaggcttgttgtcagaatcaagtggaaaaattgcaagagaagtgcttagagagcctgtcacttggtgagcacccttgcagatggtagctgtcgttattaggggtgtgctctggaattgggggcctgttgctacgttcaggtagactttcagacaggtggaggcagaggaaactgccctctcgcatgctgacatgtctagaatatgcagagtggtcagatcctctccctggcctgttcccggatctaggcgtgggtagactgagtgctgtgggagcccagaaaaggcctcagtgactctccatcaggtagctgaggctgaccaggccattcttgcaggaggacctgcagaggcaaaggcccggggtgggagagcgctcggctgtgggggcagtctctgcactgcgctgacattctcttctcttcctcccatcctctagggcccaggagacaccagcgggggctgccgctgcagggtaaatgggattccttgccacccaagctgtcagaactgccactgagctaaagatggtggggccacatgctgacccagccccacatccacattctgttagaatgtagctcagggagcttcgtggacggccttgcttgctgtagcgttgtaggggccctgcctgcactgcggttgtccacggtcacatctgccccagtgcctttgtccttcccttggggcttgccggccagacttctctcccctgcggctcccacctctgcctgaccccagccttaaacatagcccctggccagaggccttgctgggtggagcctctgtgtgactccatactcctcccaccacaacactcatctgtcaaacaccaagcactctcagcctccccgccttcagctgtcagctttctggggctaacttctctgcctttgtggttggaggcctgaggcctcttggaactcttgctaacctgttcagagccaggaaggagactgcacagttttgaaagcacagcccgtcaggtccggctctgcgtctccctctctgcagcctgtgtaagctattataattaaaatggttttccgggaagggatgagtgtgatgtccttgagaggaaatgaatgtcctggcctgggactctacacacaggcaggatcctgaggtctctgggaactgcatcagaaagttgacttgtcagtccatctgtggtagaatgaggctgtgactgagcactgggacctttctaccagatgtggaccccatgcccagcctcaggggcaaggatgctcttgggtcaccgtcagccaggacaggtggagtgtgcagtgtgtcaagtctgcagagaaggatgggcttaggggcgggaggggaagtcttgccactcctgctcccttttgacctctcagcaggcatctagggttggcaggtagatagttcaagaaggaacgaagctgctgcagttgaggggtggggttgtccatcctattttctcgtctcaagcaagatggcacagtatcgattcagcagtatttactagaacccactctgtgctggtcggaggttactaagacagggtcctgggatgttcattctctaagtctttcctccgctctgtgacccaccctccttccccttttgagatctggtatttgatgcccaacacattgtccacgctgtgacgtgaccatcatcatagcaggcagagggcgcctctgctgctgaaggcctgtgattttgtggggaagggcctgttctagcaactggaaaggcactgccacctgccgttggatgccaggactcaagagctggccccagtcactgtgcgcagagctgtctgagaatgtgtgagtggactgggtccttcggcactgcctgcattggctcagggcagtcaaccgtcgcagaggatgaggggcacactcaggcagcctccccggccctggaggcagaaaggcccaggcagaaccactgactgggaggaaacagaaaaagcagaggagagccaggctgcaggcgtgtggatgggaccagctcaggcagacgctgtctcatacccactctcccctctcttgccagggcctggcctggtgtctctcaggagcctgggcatgagacaaaagcagagattgttctcttgtggtaccacaggctgtaaccagtccacccagtgttgttttagaaatttaaatcggttgcccatctttttaaattggcaacatcgtttaccacattaaaatctagatgccctgcttctcttgaaaatgtcaaagcttggtaatgccaggtcctcacttctacctggggggaatggagtcacagagatgtcaaatctcttcatggggtgtacaccctccagtttgccacagtcctcaccaccccaggactcacgccgaggcctttccagtgcccttgcaccatcctttttctcgtaagaggaagatgaagtggggctctacgcgcggcgtatcacaggtgagggcgagaccagcagagagggctgtgctggctgtggctttgctcggcctgccccatccatgctgcagtggtgcggaggagcagggagctgtgtagggccaaccccggttcctgcctcagctccacccgccttgcacctgcaagtgaaaggtcttaagacgagcaggcccagggcaccctctactgcagggtcaggtggaggtgcctccacctcccaaggctcacccatgccaggggcccagaacttgagaggccagcaccaactctccagggccgaacgaaaaccaaaccccagggctttggactcaaaccatcgagaggaagcagcaagaggtcccaaaggtacttgagtgacacaatgatcatcattctctcctcaggggcaggacaggggcaggggaaggtgagtggaagcccattgctcagataaagagcagctgccacggagggtagcccgtcggcctatgccggcgctcactggtgtcttcctctagtgcttggggctggcatggaatctgctcaaatgcaggcagctgaaggtgagcccgcagcctggtgatcccaagtgccaaccatgaggaagtctggagaaaagaccagggagcaggggccctcgtgaggagcaggaattggcagcaggggccaccagcagaacaccagaggggacagtggcagggggaggaagatacagccaggctgggtctcagccccagctgagggtctcacctcttagctggtgaaggctccggcctgttcctgctttcggtcaccacttcatccctgggtgatcgtgggcccggtgcagggctggctacaagtgtttgttgattggtaactgctcatgaaaatggcaacagcactagcacagcttcacaaatagaaacacatttcaccaacacccttgcaggaagccctccaggagggccaagaccatccctgctttactgttatggacgtgagcctccgagaggcagtgacttagatgctcacccagccaggaaggaaggaacacactcgaccctcagtctaagaccccatcaggccactaataattctccctccaaacccagctcaggtcaaggcctatcttcacccccaaatcatccctaaggcagcctcaactctccacagcactacagccatcctgcccggccccagtgctccacagaccctaaacccgagccctcccgggctttgttggccccaaaccacctacacttgttacgtgttatttttacactggcgtttcccctcagccttgcatactgtgtggtgttgtctgacaccacttttccagctctctgacaccaactggggctagtgtcaggttccacagattaaagggctcagtcccacacttccgatggagtcacagatggggtgcccaggctacccacacttcctgggctacccacacttcctgggctacccacacttcctggccaactacacattcaggggttcccatgactccaccccctcaggttcaataatttgcctgagtgactcagaactgaagatcaccctgccctgacgcttcctggtgtggtgtcctcaaggatgcagtgtgggcaggaacagccacgcttgagatgaacagggttagggatgggagcgactggcagccactgcaatctcaagttttggggttttttttgttttttttttgagacggagttttgctctgttgcccaggctggagtgcaggggtgcagtcttggctcactgcaacctccgcctcccaagttcaagtaattctcctgcctcagcctcccgagtagctgggattacaggcacccgccatcatgcccggctaatttttgtattttagtagagacggggtttcaccatgttggccaggctggtctcgaactcctgacctcaggtgatccacctgcctcggcctcccaaagtgctggaattataggcgtgagccaccgcgcccagccctgaatctcaagtttgtaaagtgctccacctctgtcactccaactcccaggagtcactgcttgggattgaaagtttccgccctcgaatcacctggtctttctggtgcaggagcaaccccgaggcaatctaggggccctgctctaacgaattcattagcatgaactcaaatgggctggaaaggggttatgaataacaaaagacactcaccactcacgaaattccaagggttgtaggagacccgtgttaggaacccaggagaaagaccaaatatttcttagtatcccacacatacccttcctttagttctccaattatcataattctattcatccttcacattccaccctcaccttctatgaaagtgccctgaatttgctgcaggatagattgctcctggagtgcagctctggtgtgagctttcagaggcagcgcagtgccctgggcagcctgcgtaatccacgactgtcagatcaaagggcagtgtgaccctggcccacagtggcaggagctgagtgccactggcttggccccgggaacctgcgcatctcccctctgagccaaggaaacaaacaacacagacaacagtgtctccccgatggccccatccccagggtggaggccctgcaccgggcactgctctgcgcgcgcgctccccagcagccagcagtgtctggaggatactggaaagcttggcaagagtaggctgagcagctcctctgtggacagaaagggcatgtggagaagcggcacatcaagctctggttaggatccaaaaccaaatgccagctcctaggatccccagaccagggtgtgaaacacaccaagagcaccccagacccgcaccagttgtgtcgactgtgacagtacccagagtggaaaaaacatgaactcaaactgtgttttcctccactgctctctcaataccaacagacatctgtggccaaatgtgttggggatttctcccctgacaccaagcaagcaagcaattctgcagcctacatcagctgggtatcctccaattcaattcagtgctcaccctacctatagtatctggaaatggaatccacaggttcaaggctctgtcccacaagaccgccgcctctgccacaacattggactgaccaccctctttgggtggcatgatttgccaagagtggctcacagaactcagggaaacttatgtttaccagtttattacaaacattattagaaaaggatacaaataagtaaacagccagatgaagatacacacagggtgaggtctggacgggtcctgggcaaatgctggagcttctgtccccatggagtgggggtgcgccaccctcttggcacatggacaagttctcgttcccctccctccacatgttcagctcttcagaagctcccgtgttcctgggccttttatggagacgtcattggataggcatggctgaagcatggcagctgtgttgagatgaaactggacaaaaagcataaggtctaaacccagcaaggcctgtctgtccagatgcttcttggcctctctgtgcagcgttcctccttccgggtatggggcagcaccctctctggaatgagggtcttatgagctacagtcagattaaagtctggtgttgagcaagtgaaatggggcaggagaaggtcacagacagagattccgttttctgaggcctgcagtgtcccaacattataacaaagggttatgggagtgatgaaccaggaactgtggacaaaaacatctacacacgtataaaatatcacagtgccctgggctgcagctggagtgtgtgggtcataattcttgcagatgaaacagaaacagcaagactgtaggtactgcccaaggtctcctagccagtcaaggctgaccaggagtccacagaccatggcacagttctgggcctgacatggaaggtgggagcatccagatcagagaccattcccactgagcggtggccaaggacggaatgacagaagaggtgattagtaaccacatatggctgtttatttgatacagggctctgtacaaaatatttacacatattctttacagaataagtaaaccacctgaaggtaattagataatgctttcttctcaatgacagggagaatcctggtgtcagcaaagttagaaaacagataaacattctccttccgaggccacaactcaagcaaatgccacttgcttcctaggatctgaaaagctgtggccttgggaccctggtcacatgcacctcctttcctcaaccccatcaattccttcagtatttacaaacaggcttgagtacttgtggaaggaggggcagctggtgccgcccactgagaggatgacaagagggccagcttgctttgggagagcactgggaatatctgccgcatcatcacctctggaagaatttcctttgccctgatgaatacaccactgtctaaattaatccatcgacatcacacttaccccacagtggggctcctgagccatggacaatgatccatccctttgagctttttttggttttaaagtgcgtagtggtggctgggcgtggtggctcacacctgtaatcccagcactttgggaggacgagacgggcagatcacctgaggtcaggagttcgagaccagcctggccaacgtggcgaaaccccatctctactaaaaatacaaaaattagtcaggcgtggtagcaggtgcctgtagtcccagctactcgggaggctgaggcagcgagaattgcctgaacttgggaggcggaggttgcagtgagctgagactgcaccactgcactccagcctgggcaacagagtgagactccatctcagaaaaaagaaaataataataaaataaataaaaataaagtgcttagtgtaactcagcggacagggctcccagctgctctggcacgtgggacaccctccaccctgcacacaacaggcatgcaaagaggactggatatggtggggtagagtgcttctggtgtgttcactttaagaaaacatctgccaagagagaagagtgcccaggaaagaccaggaaaatacaagtacatggctgcttcataccatataccccaattctttaaagcagcaaaaggcactttttttttcaggccagagtgaatctaaaacaaacctggctttgcttacagggaagctgtcccagaaggactgagtgatgcctcttgttccctaaggtctggagagtctttgcaagtttccaacgacatttccaaccaggtgggagagaccagcagttgacgagtcaagtcagacccaaaaaacgacgccaaggtagtgagtgggtgcctatttgggagtaggatgatttgaggaaaacaggaagaaaaaccggtcagaaagtggcactttggaagtggaaagctgtttgcaaatagcaactctggctaaagcgaaaatgttaatcaagtagaaagtaaaattcaggatcttagaagctcatccttctgatgagaactatttttttttccgtgaaggaactattattactttaaaagtgagggtaatttacatatggggtgtatatattctaaaaatagtaataaaagtaccttttataagcaatgttgtgtggcttgtagaagaaagcagggaggaaaaaaaggcaggcaaaactagtctaggtctaggccctaaaaatgagcttccttcccacttgactggaaacgcccatgtgatttctaggctgaaaataggtaggatttaacgagtaacctagttcccttctgtctctgatttctgatcagctgatggagctgctagtaagaggggccgatcatgctcccagacgagtcctttggcctcttgctctccatcccaagcctgactccttcagcagcagccccctccttctgtgtccatctgatgcaggcaagcaggagcagtaagagggcatcccatgttccagttcaccttctatggggtgactaggaggttcccggtaactagggcagcccaggcccagcaggttgcaaaagcagctgcaagcttcagaaacccacttcctccaacaccagggaggtggcagagagcccatccaaaagcccactgggagaggcataagattctgtgccaggcccccaggtcccctctgtgtcaggtaggctctgctactggcctctgaagtaaaggcaaacacaaacgggcagggcagggtggcaggaataaaaaactctggacagaaacccttttaataaaggaaattccacccctcccaatccttccatggaagggtgagaccttaatgtgatgtaagaggaaggtcttctctggctttcagggaaacagctgcagctgaaacttaggggcccattccagggcacttttcaccacagccagtgcagccgctccaagtgccactgtcagccccatcactgccaatttcacaaagcggttggtccttggcttggtcaggacatcttttgttcgatcttcaggccgcagaagtccccgaaaccgctgccgcagcaccatatcaggcctctgctgggctgatgccagctcaaagtctttgaaagtagaggctgccgtcctgcaggggaaagagacggaaggaaggaagtggtatgaaagaggaggaggaaagcaaaactacaccacataggctgcgggcagagcctttcattgctgggaaagctctttatgataaagacccatatgtctacagtggggattccactggcctaagctcagatctctggaaacatgccccaaccctatcccaccagacacaaaccttccctcgcttctgctcatttacagccacccccattcaaccagtgtcccagccttgctcacctctcagcttgctgttgggcagcggcctcccgagcaagttcggatgggggaaactgaacaaaaaggtctcctgctctgctgatcagtgtctcatagggcaagtcctgagggatctgggacaacaggtggtggaccgaggccatgtcacagtcacagtccaggacttcctgctcgcgatacaacacaatctgtggggaggtagtaaagccttgcagtcagaggccagacacacagggcctgggccacctgcactccattatccttgcagatgaatttaaactggtaacagacaggactcagcccaaatgttgagcaaactcttgtatccatcaaggaagtaataacatatatacgctcagtgctactcctactctctggcccttcctgcaaacttccaccacatgacatgaaaggctgaccagttacaatctaagtccttcgggcatgctgggctgctcaggtgtccctttaagtcttgaaagaaatgaaggagattcttttaggagaaagtaggagaattattgggagattcctggagctccagcatagaagaaatggttcaaaacagtagaaagaacagtcttgctccctttaagcatcttccttctgactgttggtccacaaatccacagatgctcaagggaccagtggtcattgaaggacttccctgaattcccatctccaccccatccctcaagacccttctactaactgaagcccctaccctccaccgcaagccgcctcccttgtctgtcatgacaccagatctcttcttttcttaaatctggagttgacagcttacgctactatttccctaattgtgttcatcagctgaacatatattccagacaatgtcaacaggaaccctgacaattcacaatgcagattagcattttaaaggttcagaagtgtcatgcagcaaaaaaaatctgattttgtttatacccagcatttcccaacttactattttttgtgtgtgacacccccattaatactgcacagaatggtgtccagggacaccagcctgggaagtgctgtcttttgcatctttccataatccccaggtttcccttcagggaaaatgaccacagtgggatgggtgatggtgaacccagctgctggctcgtggcctgtacctaccacggctgcaaagtaaatcggcatcagtgggtggcaggccaggaagaagtcatataaccgcacgacgtgcctgaagtcagacaggacatgcccaaaccaggtgatgagccagctgagggcaaagatggtccctacctcagcactagaaacaaaggaaaggcaggtgtcaggtcctgtgggccatcccttccctctctctgggccttatagcgctggtgagaaggaagcatttaggaataagatttctggaaaattcagttacctaggaattcagcatcttctccttacaaaatatttaatacaaagtctttaaggtgtaccacaacactaacaccacaacagggtcctggctgctttatctcactgggtgctcgcctactggccaacaaatgtcaactacaggaacgagaagcagttgttttcagagaactacgccatgattctccttctgactaagtcttacccttctggggggcacaggtacatattcccaagcctgaaaacatgactgcattaatttttctgttaacatgagacaactgaaatatcttaagatgtagctgccagacacggtgagtcacgcctataatctcagcactttgggaggccaaagcgggcggatcacctgacatcgggagctcgagaccagcctgaccaacatggagaaaccctgtctctactaaaaatacaaaattagccgagcgtggtggcgcatgcctgtaatcccagctacttgaggctgaggcagaagaatcgcttgaacccggaagatagaggttgcagtgagccaagatcatgccattgcactccagcctgggcaacaagagaaaatactccatctcaaaaaaaaagaaggcatagccattaccttttaaaaaattttaaaaaaagaggcattggccaagaacacatttccaactaaacagagaagaaacaaaacatcacatgggatttgcaaaaaaatatttcttctctttggtacttgggaaataaaacaacccattgttggccttccccttctcgccactggatcccacaggactttgtgtttctcttgtggcaataacctcaacatcttaccttggcatacataccttatccacctctccccactagatgtaaactcaagggatgggctatgtcccccaaagagcacagtccccaaaaatgctccaagaactgaattacccagattgctggtgactggaacaactggggagaacttaacaaatccacccaagacaatgaggaaactgcgctcggcttgtgaggagtgtttcaggtgtgggggggtgtgggcgtgtgtatgcatgcacacagaaatgcagacacatatgtacctctgcatgaagtcatggagctctggattcacctggtcaatgatgggcatcagatagtttaatatatgcttggtgttgtccattgttggatccataaaatccctggagggagacaattcaataagcctggttaccaaacacttagatcagggctcagggtggcgagggctcaaactcctaaaaaagctgaccagaaaacaggccagtgagttatccccaggacggctgaggagtgatgcccgtcgtcttgtgttcctctctactggtacctgaggtggtgggtagataatttttctaccagggatgttgccagcctctcgcctaccaccagcagaaatgtgaccacaatgtcatggtagccctggtagtagtgcagctgagggttgcgctccaagatgaggaggatgatgtcaatcagttcttcctggagcccttctctctgttcctctggcatgcctggggacaggaacagagatgcctttgaacataccaagcagcctagttaacaaggaggtcgaagaaggccagcaatgaattttcagagaaaaaaggaaaatgaattacaaataatttggcaacgcatatcaagatccactgttgataccacctggcatacaggaaaaggcagctgctagctttccagtaggggaagctgcagatgccaccctaaccaagttgctgcagttaatactgctgggacacagtatttaactgcagaatttcaactatgggagccacagacggcctctgcctcccgaggtgatgcactgacagagctcagcatcatgtctgcaggatttctatcaacagcgcacagacctcaatctcacaatgaagaaatacccaatatccccaaaggaagagaaatttaactctcatacaatacaaaggaactgttccagattaaaaatggctaaagatataggacaacagcatgagaaacgcataaatctatatttccttttccagtgaagcacattactcgaagaaatggtgaaatgtgaataaaatctgtggattaattagttaactatttttcagtgttgttactgatgttgctcagtgtactgtgattacatgagagccttatatttaggaaatatgtcctgaaacacttggggtaaaaagatgtcatgtttgcaacttactcttaaatagttcagagaaaaagtgtatgtctatgtgtaaagcgaaggaaagacagaaagcagctaaaaaagcaaatgtaggccaggcgcggtggctcacgcctgtaatcccagcactttgggaggcagaggcaggtggatcacgaggtcaggagatcgagaccatcctggctaatatggtgaaaaaccccgtctctaataaaaaatacaaaaaattagctgggcgtggtggcaggcgcctgtagtcccagctacttgggaggctgaggcaggagaatggcatgaacccaggaaccagagcttgcagtgagctgagatcgtgccactgcactgcagcccgggcgagagagcaagactccgtctccaagaaaaaaaaagcaaatgtagtaaaatgtgaaaacaaaaggaaatctgggtaaaaggtatctggggaattctttgtcctatttttacaacctttcagtaagtatgaaattatataaaaataaaaaaattttaaagttacacggtcccctttaaaccaaagcaaacgttacaggaaaaactgatcctcttgatccaaagatgtattatagctggaaatagggaagcctgtctcaggagttctttcagggagttcttttactgctggagctagtgctgccagcagtaaaaatgccttggccttatgagccaggttagaagaatggcacatgcacagcttctccacaccattagctttcagttacaaacacatactcagagagagaaagcagctaatgtaagggcccaaactaaaccggacaaaggattgcaggtaagagcaaaactcacctcttgcccatatttaccccaccccttctcaaataaaaagcataccctaaaagataaataaggaaacgaagcaaacccagggctgctgataggtgaagcagtgaaaggagtgagagtaaaaattaaaccctgtgtgaattttcagcagaaaagcagtgagccaagcccagaagaccatgaatggaaaaagaatatgaagccacactgtaagttcagcctacagaaagcgtatcacagatattacatcaatggaagaggaataaagggttcagagggaaaacaggttacctaggaaaaaatgggggtggctcttgcctgtaatcccagcactttgggaggctgaggtacgtgcatcacctgaggtcaggagttcgagagcagcctggccaacatggtgaaaccccatctctattaaaaacacacacacacaaaattagctgggcgtggtggcgggcacctgtaatcccagctacttgggaggctgaggcaggagaactgcctgaacctgggaggcggaggttgtagtgagctgagacagtgccattgcactccagcctgcaacaagagtgaaactctgtctttaaaaaaaaaaaaaaaagggaggcatctgtcctatatgatctcatccaaaccagcaggctaggaaaagggaatggaccgtgggcatgtgcttttatcaaaaccacgctggcaggctactgctacctgggtattgcaagaatctgtccagggagcaagaatgccagcaggaaagcagccccttcaacaacaaaagccaggccagagcacagtgcagaagagggaggcagccagcttagaggctcctgttccctttagcaattctcctctcttcatgacctaaaggtggagttgccagaggaagaaaaataggtcatccatgtgaggtttgttgcccagttcccttcactgtgaaaattgagacaacggtccttcttttctttcttcctgaaataaagaggtaattttaggaatacattcttttttgtttgtttgttttgtttttatttatttatttttttatctattgctgcttaatttgttaattaaggaatatactcttacacaaacagggaatggcctctcttccctctaaggaatcttacatatgtatgcgcaaggtaccatcgtttttaaacctaattaagatattactcattcttgttggtgcccaattccacaccaatctgctctttaatgccagactgatggctctaacaatccttattaactcctttttgtggcttcaaggaaaaacaaaaacctcttctctcattcaccacctctaggccaggagaaattatttttggttcaggctttcacagtgggggtctgaaagtgaccagtcaagaaaaggatgactcagcaaaaggagagctctgaaggtccctgaggcggcagggtccagcatattaggtcacatggtatgacctggaacagatacagtctttccaaatgtggcaggaccgggagagcttctcaccaggagggaaccgccgcaatgaccgccggacgtccagcaacacttgttggtagtccttgctcatctgccgtaggttcttccctattgaaggaaaaggcacgttattgcaggaatgcctgagaagccagaccagaagcaaaacattctgggatgacacaaaaggcctagagggcacatgtcagcttctcctgaagaggatgatatgactcaagatacaacatttggcagggaatccctagtttggttccaaacattatgtttcctgcaagtcacaatgaccctaagagaagggagcacagactgcccaggagacaatacagcagggtgggaaggagagcaaagacgtaaggaggccaggcgcctcgtgcagaaggccactgtgcatcactgggaactgctctgaatttcaaagtccacagctacaaaatgaggatattccaaggatcaaataaaatcatgaatgtgggaacaacagaccactgaaaaaaaccctaacgcctataaagttgtgggagcactaagctgtttagaaaggtatattgagactcacataaagaaccacctaacaactcttgacccagcaattctaaaactaaagagctgcaaagaggagacagtccttgtgttcagctgctaagtccaatacagcatgaaaggaggcagtctctagccattatacatataacaagtgtacatttcctccaaccaaaccaagtgctgtataataagcgtacatttctctcacaacccaaatccaaagctagtaaggctgggcaacacttcctcacacgtaggcttcacggtataaaaagatgagggaagtttggaacctgatagaagaacatcatctcaggattcagggtgtgaacatggcactgccttagccttccaacaaaaagctgactgctctgaagcagccaattccaaggataataacaagtggcaactcaacacctactgggtgacatcatgacgctgtgaactttttggtggcagaagtcctgtttcaatcatctccagtacctggcaatcatagcacaactaatatttgccaactgaaagaatcctcagcacttggcattttgccatgatggcaggaaagctacaaggtgagtgcactgagtgaatgagcagcagagtggattcactgttctacaggacttttactattttgaacttcattccaaggaactcttttcaccacatgggccttgcacattagttaggtaactcttttcacagaattacaggattttagaactccaaaggatttcagtatttcccaataaaaagagggtgttttctttttttttgagtatctcactctgtcgcccaggctggagtatactggcgcaatctcggctcattgcaacttccgcctcctcggttcaagcgattctcctgcctcagcttccctagtagctggaattacaggtgtgtgccaccatactcagctaatttttgtatttttagtagagatggggtttcaccatgttggccgggctggtctcgaactcctgacctcaagtgattcacctgcctcagcctcccaaaatgctaggattacaggcgtgagccactgtgcccggacaaaagagggtgtttttgtgtgtgtttaattttactttacttttagagattggatcttgccatgttgcccaggctggcctcaaactcctgggctcaagtaatcctgcctcatcctcccaagcagctaagactacagccgtgcaccaccatgtctggctagtttttaaatttttgtagagacagggtttcgcaatgttgcccatgctggcctcaaacttccagtctcaagtgaccctcctgcctcagcctccgaaagtgctggaattacaggtgtgagtcacctcgcccagccacaaaatacgcattttttttttttttttttttttttgagacggagtctcactctgtcacccaggctggaggacagtggtgcaatctctgctcactgcaacctccaccttccaggttcaagcaattctctgctgcagcctcctgcgtagctgggattacaggcacctgccaccatacctggctaatgttcgtattttttttttttttttttagtagagatggggtttcaccatcttggccaggctggtcttgaacttctgacctcaagatccacctgcctcagcctcccaaagtgctgggattacaggcgtgagccaccacacccggcccaaaatatgcatttttaaaaaacacttgccaagcaagtatgcagaacaaagcatatgcatttttaataaattcacttgcctagccaatattttaatccctaataaaaaaagaacttgcctgggcgtggtagctcatgcctgtaatcccagcactttgggaggccgaagcaggctgatcacttgaggtcaggaattcgagaccagcctggtcaacatggcaaaaccccatctctactaaaaatacaaaaattagccaggcatggtagcgcatgtctgtaatcccagctactaggaaggctgaggcaggaaaattgcttgaacccagggggcagaggttgcagtgagctgagattgtgccaccgcactccagcctgggtgacagagcaagactccgtctcaaaaataaataaaataaaaacaagtaaaaaaagaactcattccacttttgaataaaattctacttatcggtttggccttattttcagagtgggcccaagcatttcccaaaacaccctagatttattcatatacccttggtttgaaaggaccataaaaattaaagatcctggaattcttttccccctgtctcctagataagctcccctcacagcctcccccactccccttacctgatataggaggtgggtcattggcattgacattgaggagcttgggccacacttttcgtctgatctcatcagtcaggagccctccttcactgatagccatgcgtctaagggcagccacatcagtgggatcactgttcagagcctggtgtatctctgccactttctttttccttttggcgttaaagtctgaagataaggatagggaagaattaggcgcacattcagcacgtgcatattttctgcctaggactcaagctcctttttgatatgaggtacaggtaagtatctcctcttagctctaagactgcctgctggcataaagtctcacagccagatgcactattcatttcgggcccagtctactggacctcatggtgggaggcttggagagcccactataaaacagattttaaatcaccgatttttaaaaagatagtctctttttataggtctgaaccaaaaatcataggcacagactggaaataattattagttgttgttgtttttaagagacagtgtcggctgggtgtggtggctcatgcctgtaatcccagcactttgggaggccgaggtgggcggatcacaagttcaggaattcgagaccagcctggccaatatggtgaacccccgtctctcctaaaaatacaaaaattagctgggcatcgtggtgctcgcctgtagtcccagctactcaggaggctgaggcagaagaatcacttaaacctgggaggcggaggttgcagtgagccgagatcgtgccactgcactccagccaggatgacagagcgagactccgtcttgaaaaaaaaaaaaaaaaagagacattgtctctctaagttgcccaggctggcctcaaactcctaggcaaaaccgatcctcccacctcagccttccaaacagctgggactacaggtgcatgccaccatgcctggtccagaaataattacacgtacttttttttttttttttttttgagacggagtctcggtctgtagcccaggctggagtgcagtggcgcaatctcagctcactgcaacctccgcctcccgggtcccggttcaagcaattctgcctcagcctcccaagtagctgggatttcaggcacgcaccaccatgcccagctatatttttgtatttttagcagagatagcgttcacaacgttggccagggtggtcatgaactcctgacgtcgtgatcctcctgcctcggtctcccaaagtgctaggattacaggtgtgagccaccacgcccagcctatatgtacttttttttttttttttttgagaaggactcttgctctgtcgccaggctggagtgcagtggcacgatctcggctcactgcaacctctgcctcccgggttcaagtgattctcctgtctcagcctcccaatacattaaaaaaaaaaaaaaaaaaaaggtaagtgaggctgggcacggtggctcatgcctgtaatcccagcactttgggaggccgaagtgggcagataatgaggtcaggagttcgagaccagcctggccaacatggcaaaacctcatctctactaaaaatacaaaaattagccaggcgtggtggcatgcacctgtaatcccagctactcgggaggctgaggcaggagagtcgcttgaaacccaggaggctgaagttgcagtgagccaagatcgtgccactgcactccagcctgggcgacaaagtgagactccgtctcaaaaaaaatgataagtgaaaaaagaaatgtgttaaaatcagacagatcttggttcaaatcctggctctgccacttatctgatccataatcttggacagatgacttccctgctctgggcctctggactgacaccctcttgtcaggatagttaccatggtacacagtagatacttactaaatattagctcccctcctcactctgaaacaacatgtattttacaaatcaacctacagatatttaattagtacgtaatatgcaaagcactaaggagatatactgtgtaagtaacaagcaaggaattacaactataataaacgctcagtaaattcaggcatatctagcagttagtgtcaatgttttcatacaagaatgtccattcttaattcccaaacttcacagagcatatacatctcttactgtaacaattttttcctgttgtttaaataggaaaaatgcatgtcaccaaaactcgatactacattgaaaacataaccacatgaaaaggtctcctgttacacgctactacaactggtaaaaacattagaatcacatagagatttttttttttttttgagatggagtctcactgtcgcccaggctggagtgtaatggcgcgatctcagctcactgcaacctccctgtcccaggttcaagtgattttcctgcctcagcctcctgagtagctgggattacaggcatgcaccaccacgctttgctaatttttttttttttttagacagggtttcaccatgttggccaggctggtctcgaactcctgacctcaagtgatccacctgcctcagcctcccaaagtgctgagattacaagcgtgagccaccacgcctggccaacacagagatgttttcaaaaccagtgtcaaagggtacttgggtttccagtgtggctggtgacactgccaccagacactgccacagagaggctgtgacactgcatacaaaggaactgtttcttaaaaaccatagtaagtaatgttttaagcatcttacatccttatgtgatagtctgttattcatagacattttgccatgtttaaattactttttaggactggtccctgagtggtgctatttacaactcattgattacaatcagttagatttctttgttccttttccacgcccactgcttcacttgactagccttcaaataaataaataaataacttttttgggaaattggttgggaatttgtggttagtagctatcatatcatttttctatgtgaaataacagagtattgctttttggcctttggctgagatcaggggagataaaggagtaaaaggctctgaaagtttgcatgcagaatgtctgcttttagggatggcttgtggaagttaaatggatgatgcctgtatttcagttctttctagttgccagtaccattgagaaaatatgtcaaaaacacaagaaatgttacacaagacaacaccaaacgtcacaaggcagtagactataattgtcaaaaaaggtgcatgcagacaataatggccaagagctcaaagagactgcagtgggtcagggccaagctaacctgagaagtgtaccttaaaaaggaagaggagcaaaactctcttgacatgcttaattgtgatgtttaatgaacatccttgcagtgtaagacgacctttttaaaatacattcttggccggggacggtggctcacgtctgtaatcccagcactttgggaggccaaggcaggcagatcacctgaggtcaggagttcgagaccagcctggccaacatggtgaaaccctgtctctactttaaaaatacaaaaaactagccgggcatggtggcaggcgcttgtggtcccagctactcaggaggctgaggcaggagaatcgcttgaacctgcaaggtggaggttatagtgagccgagatagcgtcactgcactctagcctggacgtcagagcaagactctgtctcaaaagaaaaataaataaataaataaattctctcggcttcagacctacctatctttggtgtctcaagttaaacccaaagcagcacccatcacatctgccttttctttacttttgtctcctattgcttccagataccttcttccttttcctgcaaagcccattctgctggagtggaaaagtccaatgccttgatgccagggtcttgttcagtcactcaagatggagtgtagtggcacagtcatggctcactgcagcctcaaccatatatatatagtttaaataaatcaataaaccaataaattctctcttaatgatggtttgagcctcaccacttgattaggacaatcagcataacctgtagaatcttatttggaattgaattctgtattgtaattttgttcctgttcatttttaaattttatttttctttcactgtaaagatgatactctgctttaaatgttaaaagtgtacaagcaaaaggccgggcacagtggttcacacctgtaatcccagcactttgggaggctgaggcaggcagatcacgaggtcaggtgttcgagaccagcctgaccaacatgaggaaaccccgtctctactaaaaatacaaaagttagcctggcctggtggcgcacgcctgtaatcccagctactcatgaggctgaaagaggagaattgcttgaaccccggtggcagaggctggagtgagccaagatcgcacaactgcactccagcctgggcgcgacatagcgagactccatctcaaaaacaaacaaacaaaaaaaagtgtacaagttaaggaagccaggtacaatggctcacacctgtaatcccagtgctgtggagggccaaggtgtgagaatcacttgagtccacaaaatcgagaacagcctgggcaacaaagtgagaccctgtctctacaaaaagtacgaaaagttagccaggcatggtggtcccagctactcaggaggctggggcgagaggatcacttgagcccaggagtataaggctgtggtgagctatgatagcaccactgcacttcagcctaggtgacagagcaataccctattatcaaggcactggacttttccactccagcagaattctaaattttatttaaactatgtagtatatattaggtgcaaggcaccagagttcatgtgaagtggaagatatcaccagaaggtagggcagattttagaaataactaacagaaggtacattaggttttagaagggacaccaagcatcttccccagcaatgttctagtctgaggaaaaggaggaaggtgtcctggtgacctgtctctaaaaacaaaaacaaggctgggcacggtggttcatgcctgtgatcccagcattttgggaggccgaggcgggcagaccacctgagattgcgagtttgagaccagcctgaccaacacggagaaaccccatctctactaaaaatacaaaattagccgggcgtggtggcacaggccggtaatgccagctactcaggaggctgaagcagaatcgcttgaacccagggggcggagattgaggtaagctgagattgcagatcgcgccattgcactccagcctgggcaacaagagcgaaactccgtttcaaaaaaaaaaaaaaaaaaaaaaaaaaaaaaaaaaacaggctgggcgcagtggctcacgcctgtaatcctcgcactttgggaggccgaagtgggcagatcatctgaggtcaggagttcgagaccagcctgaccaacatggagaaaccccgtctctactaaaaatacaaaaaattagccgggcgtggcggcgcatgcctgtaatcccagctactcgggaggctgaggcaggagaattgcttgaacctgggaggcagaggttgcagtgagccgagatcatgctatatgccactgcactctagcctgggcgacaagagcgaaactccgtctcaaaaacaacaacaacaacgacagcaaccacggacggtggctcgtgcctgtaatccagcatttttttttttttttttttttttgagacggagtctcgccctattgcccagactggagtgcagaggcgcaatctcggcttactgcaacctccacctcccaggttcaagtgattctcctgcctcagtctcctgagtagctgggattacgggcacgtgccaccatgcctggctaatttttttttttgtatttttagtagagacagggtttcaccatgttggtcaggctagtctcaaactcctgacctcgtgacccgccagtctcagcctcccaaagtactgagattacaggcgtgagccaccacacctggcctatcccagcactttgggaggccgaggtggatggatcactgaggtcaggagattgagacgagcctggccaacatggtgaaactccatctctattaaaaatacaataattaggccaggtgcggtggctcacgcctgcaattccagcagtttgggaggccgaggtgggcagatcatgaggtcaggagatcgagaccatcttggctaacacggtgaaaccctgtctttactaaaaaaatacaaaaaaattagccaggcgtggtggcgggcgcctgtagtcccagctactcgagaggctgaggcaggagaatgaggtgaacctgggaggcggagcttgcagtgagctgagatcacaccactgcactctagcctgggtgacaagttctgtctcaaaaaaaaaaaaaaaaggcagaaagaacatggattcacctgcttatacaagaaaaaaggaaaaaaaaaagtgtacgagttgccttgttacaataaaactaaatgtgtatacacacaaaggaaatggaggacattcaggggctgggatgaagggtacagaagaaaggccaggagatacggcccttccatttgacagtaaatagactaattaaaaaatatttatgtagtatatattaggtgcaaggcaccagagttcatttgaagtggaagatatcaccagaaggtagggcagattttagaaataactaacagaaggtacattaggttttagaagggacaccaagcatcttccccagcaatgttctagtctgagaccattgtgagtctacaaactgtttctatgacaaagctgtacattattattattattattattattttatttttattttttgagacagagtcttgctttgtctcccaggctggagtgcagtgaagcaatcttggctcactggaacctctgtctcttgggttcaaaccattctcgggcctcagcctcccaggtagccaggattacaggcgcatgctgccaccacacctagctaattttttgtatttttagtagagacagggtttcaccatgccaggctggtctcgaactcctgacctgaagtgatctgcctgcctcaggctcccaaagtgctgggattataggcatgagccatcaggtctggcccattattaacataaattaaagttggtactaataagtcacaggtgagctacctatgagacctgaaacgtaaaacccacataaacagaggcactagctggtttggagccatgtgcaattggaagtgcgacagaaagataataggagtaacttttcacctcggtaaacctgtcctcctggcttgactgctgtttcctggtaacctagtagggtgaccatttgtcctcatctgtctgagatcttcctggtttatacctagagtcctggcacaattgttcacagcaaaccctttctgctccctgtattctcaaatatgtcccagtttggaagccaaattaaatggttacctacctagaaatcattaaaaataaaaccccttctgggcacacctataatcccagtactttgggaggccaaggtgggcagattacctgaagtcaggagatcgagaccagcctgaccaacatggtgaaaccctgtctctactaaaaatataaaaattagccgggtgtggtggtgcacgcttgtagtcccatctactcaggaggatgaggcaggagaatcgcttgaacccgggaggcggaggttacagtgtgccgagatcatgccactgtactccagactgggcaacagagtgacactctgtctcataaaataaataaataaaaaataaaataaaataggccaggcgtggtggctcatgcctgtaatcccagcactttgggaagtcgaggcgagcggatcacctgaggtcaggcgttcgagaccagcctgaccaacatggcgaaaccccgtctccactaaaaatacaaaattagccaggcgtggtggcaggtgcctgtaatcctagttacttgggaggctgaggcaggagaatcacttgaacccaagaggcggaggttacagtgagctgagatcacgccactgcactccagcctgggcaacgagagcaaaactccgtctcaaaaaaataaacaaaataaaaataaaaatataataaaataaaaaccactgccgggcatggtttttagtccagacgtggctcatgcttataatcccagcactttaggaagccgacgtgggcagattgcttgaccccaggatttggagagcaaccagcctgcacaacatggcaaaaccttgtctctacaaaaaataggtgggcgtgacggcgtgcacctgtaattccagctgcttaggaggcagaggcgggttgtagtgaggcatgattgtgccactgcactccagcctgggtgatagagtaagactctgtctcaaaaacaaaaaaaaatctccaatttcttctgtcagcataacacctagtcaattgttcatgagatgtgtcaagctcttgactcaggtgtgtcctttcatccattcatccattcatccattcatccgcctgcccatttgtccagtcattcatcagtctgtcacttaatgggtgtctacttgtactaagcactgtactggggataaaaagatgaattactccctcccagcccttgaagggctcacagtagggacacaaacaattattatatataatagaatctgagggattatgaaaatccagaggaaagaatgactttttttcttcttctttttttttgagacggagttacgctctttgttgcccaggctggagcgcagtgttgcgatctcagctcactgcaacctccacctcctgggtttgagcagttctcctgcctcagcctcccgagtagctgggattacaggcattcaccaccacgcctggctaattttttgtatttttagtggagacggggttttgccatgttggccaggctggtcttgaaatcctgatctcaggtgatctgcctgcctcggcctcccaaagtgctgggattacaggagtgagccaccacacctggccaagaatgactacttctaaagcagtcaggaaaggcttcaccaagaatatattctggatccttcttttaattttttttttttttttttttgagacagagtttcactcttgttgcccaggatggagtgcaacggcacgatctcagctcaccgcaacctccacctcccaggttcaagcaattctcctgcctcagcctcccgagtagctgggattacaggcatgcaccaccatgcctggctaattttgtatttttagtagagacagggtttttccatgttggtcaggctggtctcgaactccccacctcaggtgatccgcccaccttggcctcccaaagtgctaggattacaggcatgagccaccgcatctggcccttctttttaatttttatttatttatttagacagggtctcactctgttgccttggctggagtgcagtggcacaatcatagctcactgcagcctcaacctctagggctcaagcgatccttccacctcagccttctatgccaccatgcctaattttaaaaaaattttttgtagaggtggggtctcattatgttgcccagactgatcttgaactcctgggctcaagcaatcctcttgcctcaacctcccaaagtgctaggatcgcagatgtgagccaccacactgggctctggtacgttcttaaagaaaattttgccacagggaagagtgtgttaaggggaaagtactccaggcagaagagttatgtgcaaagaccttgtcacatgaaagaaacaccatgtccaggaaacaaagagttctatgaagctgaagtgccaggtaaagggagagaacagaagcaggtagcaccgcagtaaaagaggctgggctggattcatcccgcaaaggagtctgggtttatcctgtactcaggaggaagacagggagggattttactttgggcctgagggccatcctttggaagaccaggctgtacgttttcaagaggggtcaaaaacatgcaggaaacagagaagcctttttatataacatcggtggaggcaaaccatgagaagaatttaatttccaacaaagagaaaaaacctaacatatttaatttttttttaacttgggagtacccctgcactttccacacatcacaaattgacagcacttgagtggcaatactgaatactgcttgagggaagctgatattcagaagtcttgttaacctatttgctaagagtatgataatttttcttcagtttgtttagacatacatccaccccatctctctttctaaataagctattcggcaatctgggagaaaggaaatcttgtatcttggggaaaaaaaccactatgcagtcaactgaatttccatgaggttttggcaaaccatttgccagaatgttacttaattctgaactcaaatcctcaaatcatacctcccataactcatttctcttaagactctgttccaattttttttttttttttagagacagggtcttactctgtcacccaggctggagaatagtggcacgatcatggctcactgcagcctcaaccttctgggctcaagtgatcctcctgccttagcctcccaggtagctgggaccacagacaagctccactggcccagctaatttttgcgtatatatattttgtagagaaaaaaagtgttgcccaggctgatctcaaactcctgggctctagtgatccacccacctcgacctcccaaagtgctgggattacaggcgttgagccaccatacctggcctccaattctacttttaatcctgcatttcaaaatttacttactatttcaaaatttttggcactctgtgggaacgcaacaaatacgtgcagaatatagtaagtgatttagtttagttattgttcctctggaaaaaactggcttgcagtaaatgacattatttttcccatactgttaaggtgatgctcactgcagaactctctaaacagatctgcagactctttggcctgtttctaacactaccggtgtttcccagaggaggatgctgtcccaacgtggatttcggctgctgtttttttcaggccccaacaccaccctcctcaaccccacagcctagtgattaaatgtcagtggcagatggagaaagcactcccacgtgtgccactctgacaaatactttattccaactaaatgtataggctctcactgtgacataaaaagggaagaggaaacagaaaattcaagtgagctaaagatgtatgaattacagagtgagatcaactgctagacgacacagggagggagttagcagcgtctccactgaaagacaaattcacagacatcctgtttatttccgaaagagaaacatcatagagctattcttgggatgttcaggaaaagattaaaataaatgcctattatctattgtatttcgagataaactttatagatttagagcaggacacacatttctggacttgagaacgctgtatctggcttggaataaaagcccacatttcatctagaggtagaatgtatgtcattctaatctccctcaatcctttcttctccaatttctttattgccccacttacaagatagtgcactattattccaaagctgataccttccaaattcctttatagtagaggtcttggctatcataaccatgatggaacgaatgaccgtcctacagctggctgcaaaatataagactgctataaataaatccctgatgcctgaaaagtaattcattcaacaaaggaagataggtatgactttggcctactcttcattagaacgcttatttttatttatttatttatttatttataaagagggcaaagcagactttatttgaggggcaccacagcaataggtatagcaacaactgcaacagggttttgtagtcagggagggagatcagactcaactccctaaaatgctaattttaacaatgggacacttcatctgaactgtggttcttaatggttcagataaagatgacacaacccactattggcttaaacttctcccaactctggctacagaatccaggtaaagatttctgccccctcagagtaataggcatgtccaaaatcacctggattagggcacttaatacactgggaagggacgataacaactaaagatgaccactatccatgcctcctctaaaagttttttcatatattttttcatatcaccaaaacaaatactaacttggatcaactaatttatataatggaatctcgtgtgagcgtacaaaattccatactgattatttggtttaagcctgcattatcataaaggctttacagtctttaaactgaaattaagctcaaattaagaaatgctagtcttaaaacaatggaaggggggggccgttttgtgtggagggagggagacagacatacccctacacccacccacaactactgatattgacattggaaattaacttgaaaatttatgcctgtagtcccagctactcaggaggctgaggtgggaggagcacttaagtccaggagttgggagatgacagtgagctttgactgtgacactgcactccaacccgggtgacagggcaagatcccatctctcaaaaaaaaaaaaaaaaaatgctttaactccacgtctgtaccagaagaccacagcaggagaggaaaaccttatttcagtctgggtaagagttctattaaacacaaaataaaacaaactagcctctgtttctggaggtcttcattagtagtttctacaaaacagtatccaaattagcaaagattctgttaactacctggaaaaagcaggtaccaagaaagaatgtttcactacaatggaaaaaaacagtctagtaagtaaaccaatctgactataaacgctacaaaagagggattctagcattagtaactttgccaacaatactctgatatgattaaaaaacaaaacaataacaaaaacaaaaaacctcatctttaaatttgtcccattcatccagagaagcaaaatcaaggaaactagagggggtaaagtcttgcaacagatacacagctgcactgccaacaggtcacaagacccatgctgcctagggcattgactgttatgccatgaggacagacatcacacaaacaccagtaattaaagggttacggtgccaaagggttcagagctccacttccattcagtatcagaacataagaaaaagggaaaaacagaaaatgagcccaaataaaatataaaataaaatatagataccaggagcttcctcaaaatatgtgggttgtattaataacgtgtttggctctgttacgggcaccatccatcagaggactggaaatagggaaagtcaccttagtcttcctcaaggaaaaaagattatttaacttggttcacggtgtacattcataattttaactgtcatgtatttattgaatgaaaaacatttgagaacatcatgtgcaacaaaaacatgatttcacagaaattgtccaaactaaaagagtataaaaatagaagcgctttttatacaattatttacttattattattattgagatagggtctccatctgtcacccaggccggagtgcagtggcgcaatcatagagtagcctctaagtcctgggctcaagcgatcctcctgcctcagcctccagagtcgttgggatcacaggctcgagcctccacacccgactaacttttaaaaactttttgtagagatgaggcctcgctgtgtttcccagcctgatctcgaaatcctggcctcaatcgatcctccaaccatggcctcccaaagcgctgggattacaggcgcgagccatggtgcccggccgcttttacacaattgaataacattaaaataggtggcagaagacagacagaaagtcgattcgtggttgccaggcgtcgtgaataccggggaacgcggagtgcctattaatgggtaagggtttcgttttggaatcagacagcggcgatggctgcacaactttgtgaattttctaagaatcactgaactgtgcaccttaaaggaagaactgtgtggtaattacatcggcggtacgcgggcagcgcgtcaatcaagccggcgacggtgaatgcagttcgggagagctgatacccctcggggaggcggctccgggagcctgcggacgtggcggacgcctgggacggggtgggcctggcctccgcgctcgaggagtcccagtcctctccagatggaagaaagccggggcgcgaagccgccgcccgctcttctgcctggggacgcgactctgccgccaggctccctcgggtcagctcggcacccgcccgagcccccccagttccaggccctctcctcatcagacgtgccctgggccctcagcctgttcctctcgccgcccggaaccccgcagcagccccgggtccccagcccgcgcccctccggcgccgcctccgccagctgcccctgccccccgggccgccctcgcaggccgctcccggcgccccggtcggcttccgtacctgccttctccgcgccgccgtcccagtggccggaggtggggccgtcgccctgcgcactccggagggccatgccccggggccccgggcccccacccgagccccggctggtggcggagccgggagaagacgcggctccgaccgcgggacgtagcacccgctcggcatcggcaggctcccctccgtcggccagcggcgcgcaggcgcgcaggcgccccgctggccccgccccgcgccggcacgtgaccctgcgctacgcccggccggcggcgggggaggctgcggaaagagcgcggtgagcgctctgaggagttggcttcgtctgcgctgtagactctacggtgtagagtgtggcgctcttgagcgagtgtgctcgagaccagctgtcgtttcctttgcttctttcatctgtaaaatagtattgatgataataaaaatattgaactcacaaggttattgagagtgtttagaacatcaccaagcatatagtaaatactccacaattatgaccaatttttgcttaccaaggattatttttttacctcctgtctcgtctccccacacgaactcctgtcatcagttcttgggtacttggggatctagcaggttcatgtcatacgggtccgcaggttatgcactgcacaaggcctgggagcgccatttacgtagacgttcacgtgaaccgtgcccccttaagttgtgcgaaatagtggccactcatctaaagcagcgctctggcttatcaggtctgatttccttctcgtcttcagtgatattcctttctttccaattagacatccattcccttggttatatccctgatattgtgattgtggcctcccgaatttctagtgctaggtcttcatgctgaagttcccataattccagttgcttgatgactctcttccacctcccacccccaaccacaacagttctttattatcctgagacctccagcccatgaaactcctgacctcgtgatccgcccgcctcagcctctcaaagtgctgggattacaggcgtgagccaccgcgcacagccaagttttacagttctattcataaatctagtaaattatatcagttatttggtcccattaataaactaagctaattaaaatcctttgaacatttgaaactgcatttataaattcaattcgtttttctaagtatcacaggtttctaacaaagcctttcaagtccttgtgtaattcttgtaaatgtaatacatttataagaatactgagtcatgagtgctttcaaatgtgtcaatacaaacgagatttcatcttaaaatcaaaagtctaaatctattcaaatacatatttgtaattagtacaagaataatctgttagaattctcaaaattatcttttttttttttttgagacagagtctcactctatcacccagactggagtgcaatagcgatcatagctcactgcagcctcaagctcctgggctcaagctagcctcctgttgcagcctcccgagtagctgagactgtaggtacacactaccatgcctggctagtttttttagtttttatagagggggtggggaatctccctatgttgcccaggccggtctcaaactgccttcgcctcccaaagctctgggattacaggcgtgaatcacagtgccaagctcttgaaattatcttgaacattataggaatttaaagtatcacatttacacagatgccttaatgcaaaattattaatactagaagtttgaaaacatttctagtctttgttctaaatcatctgtgaggctcatgcctgtaatcccagcactttgggaggtgaagggctgcagatcacttgaggtcaggagttcaagaccagcctcaccaacatggtgaaaccccatctctactaaaaatacaaaaattagctgggcatggtggtgcctgcctgtaatcccagctacttgggaggctgaggcaggagaattgcttgaacctgggaggcagaggttgcagtgagccaagattgcgccactgcactccagcctaagagacggagtgagactccatctcaaaaaataaataaataaaatgaaataaatcatcattgaggttaaaagatgcttagtgcccactgaaggaagatttaagtcatcccagtttaagagtaacgtgctcaagcaatttgagatatttattcccttctcagtttactgcgctggtcatccagccagctggattcttgcttttggtagtgatggaacagtgacccccaccccattcccaccaccacaactctaggactaaacagttgtgtggtcgttgtgaagcttgggccagaatttactttcaaaaaatgtcccgcttcatgtataatataaagaccttacaataaattcccatttcttccctcctgttcttcttgctgttgtcctacattttactttttaaaatcccttccttctcttgctttctcccctctacccaccaaccacttgcaaacaaccactgatctacatcctgtcactatagattggttttcattttctggaattttttatggacggaatcatatagtatgtagtcttttttgtctggcttcttttactcagcgtaattattttataagcaatcatgttgcattaatcaatagttcatttgtttttgttgttaagtagaatttcatcttagaaatataccacgattcattttatcagtattttaaatttttgcatgtgctgcaagtacacaattcattgctaatatgcttgccttagaccaggcggttagcaaaaaagatggtctgcccacctgcaagccaaaaccactctactgcctgattttgcacggctcatgaactaagaatggcttttaccttgataaatgttgaaaaatcacaacttaattgtagcacattaaaactatatggaatttaaatctcagtgtccataaacctttactgaaacagagtcacgctcattcatttacctactgtctatggctgttttcatgctgcaacggtagagttcagtggttgcaacagagatatggcctacaaaacctaaaatatttattatctgctcctttatgtatttatttattttatgtgtgtatgtatgtatgtatttttttgagatggagtttcactcttgttgcccaggctggagtgcaatggcgcaatcgcagctcactgcaacctccgcctcccaggtccacgtgattctcctgcctcagcctcccgagtagctgggattagcccgccaccatgcctggctaatttttttgtatttttagtagagacggggttttgccatgttggtcaggctggtctcaaactcccgacctcaggtgatccgcccgcctcagcctcccaaagtgcctgggattacaggcatgagccaccgcacccggcctatctgctcctttatagaaaaagattggcaggacgtggtggctcacacctgtaatcccagcactttgggaggccgaggcaggcagattacatgaggccaggagttcgagaccagcttggccaaagtggtgaaaccccgtctttactaaacatacaaaaattagccaggcatagtggcacaggtctgtaatcccagctactcaggaggctgaggcaggagaatcacttgaacccaggaggcggagactgcagtgagccgagatcacaccattgcactccagcctgggtgacagagtgagactccacataaaaaaaaaaaaaaaaaaaaaaaagttttgtgaccctctattgtagagatggaggtattggggctgttgcccaggctggccttcaactcctggcctcaagggatcctcctgcttcagcctcccaaaaatgatgggatttcaagtttgagccccatgcccagctcacttcagttatttctaaggtaatttaaaaaagattttaattgtacttaccttcattcaatttccagtgctcttaatttcattgtgtagacccaggtttttttctggtatcatattccttttgcctgaaaaacttcctttagtatcttgtagaaggagcaatgaattccgtttttctttatctgaaacagggtttatttctcctttattttgaaagacactttcatttgggtataggattccggaattttgggtgagcagtttttgtgtgtgtatgtgtttttcccctatcagcatcagcaataaggtcactccattggcttctagcttgcatagtttctgacgtctccataattcttagcttcctctgtatgcaatgtcttctttttccttgctgcctttaagattttcttttgttttagcatttcgagtatatctaattttatatgtgtgtgtgtatatatatatatatatatatatatatatatatatatatgagtttattctgcatgttctctgagcttcttggattttgtggtttgctctgtccttaatgttgaaaagttctcagcctttaattcttcaaatgtttcttttcctgttctctctcctttcttctgggaatctaactataatatgtttgagtgtttgatattgtcccacaactcttggatgttctcttttgacggttttttttcccttcaccctttttccccagtgtttcagtttgaataatttctcttgacctatctttgagttcattcattctctccttggctgtgtcaaatccactgacgagctccatgaggcactcttcatctctgcatctctgttagtgtgtttcttttttttttttttttttgagacagagtctcgctctgtcctccaggcgtgcagtggcgcaatctcggctcactgcaagctctgcctcccgggttcacaccattctcctgcctcagcctcctgagtaggtgggactacaggctcccgccaccatgcccggctgattttttgtatttttagtagagacggggtttcaccgcgttagccaggatggtctcaatctcctgacctcgtgatctgcccgcctcggcctcccaaagtgctggaattacaggcgtgagccaccgcacctggccattagtgtgtttcttattttgaccagttccatttggttctcatagcttccatctctctactgagattgcacttttgatcttgcatattgtctacttttactgttagaccttttaccatattagttatttgaaattctgtatcacatagctctgacatctgtgtttggttctgaagattgctttgtctcttgggagtatgtcatttatctcttgcttcataagtgttggtgaaagttggacatcttgtgtaggatagtagaggcccagggaaatgggttttgtgtagaaatgggcacacttttccttctgttaggtctttagcgtgggggtttgaattaacctagttaggagttgtgataggctgggtgggtggctcatgcctgtattcccagcactttgggaggccaaggcaggaagattgcttgaacacaggagtttgagatcagcctggacaacatagtgaaaccccatctctacaaaaaaaataaaaattatctaggcatttttggtgcatgcctgttgtcctagctactgggaaggcttgccgagtctgtcctgcagactctgcccaagcgacggatgaaaggagtactcagatacagatatccagtgaaagagcaggataggggactgccagcactaggggccgaagagaattagcagttcccctaagccggcagccctcgcatttgtttggtacagatttaatgacaaaggcttggagcaaacacaatttgtgggtaataaacattgttgaccccccgagtagagagcagtcctgcatgcaaatgattaaaggttggtttctggagacaggagtagacaaatttatctagataagtttctttacattcccttgttatctgccctttgctctcaggctccagatgagacaatttggctgccttcagccataatttccttccaaagcttttgtaaaacctcctggcctttcaagaaggtttgtgtctttactataatttctcccaccaccctgaccaatctcctacatctcccccttttctgttttttgcatcagcttttgttaattgaagagtacagatgtgcagcaacaggtttttcaggtgtagtggtcactgcttgtatttcggctttgcatcctagaattagtaaataacataagataaacgtgaatataatcagtaacattcttttccaatcaaggagtgacatgtagtgttacttgccacctcagttcagtgtgtgcccttactaaggaaccccactgggggtatgttaaccccttccagccaagcagttacgttattagaggctgggaagggggtgtccacccaggtaatagggtggaagaaaagcagatttagaagatgggcccaatagagtgtagcaggtactggttgcaggcagagtgagggaattaaacaaggttaataaagcatagtaaggaataaattatctggagtgaatggtgtttgtgtccagagcaggattcgttcagcctcctgagttgtcttcttcagcatcccccaggtaatgtctggggcttgtgtcgtctgaggaagctgcatcatccagggctgtgggtcctgcagggacatttccttcatttctggtaccaggttgggtcctagccacaccatgttaaggtttgatgcgttgtgctggaatccaaagaggacctgaggtgatgtgaacacaaccatatcctcttccccatgttggcaactcatttggaccacaccatacattactgtttacatctttccataaaactgtgggttttatgtcttgagaggttttagcaaagtgcttttctatagctgattgaaatttatcatttaaatttaagaaattaagggtaaataaggcttttgctagtagtgttgcagggtccttactcatactcccccttttttgttttttgagcatatttttaagagtggacacgttctactatggcctgtccttgggggttatacgggatgcctgtggaatgctggatgttccacgtgtgacaaaattgttgaaattgtgagctggcatgagccagaccattatcagttttaatttttgtgggccgccccataaatgcaaaagttaagagaagagtttaataacatatcaggtggactttccaggaagagcattgtgctaattaggtgagaataggtatcaatggatacttgtacatatcttagttttccaaattcagggacgtgagtaacatctgtttgccataactgattaggttctagtcctctagggttaacgcctgttgaaggaggggacatgcctgtgagctggcaatccgggcattgcaggataatttgtttagctagtctttgggtaagttgaaattgttcagttaagttccttcaattttggtggaaaaattgacgcaactgcatggcttggtgaagcagtgacatcataacttgcaggtctgcttgttcattgccataagccagtgggccaggcagtgagctgtgggctcgaatatgtgtgataaaaataggatgtgtacgttgatccagcaattgctgaagttgaagaaaaagtgcacacagggtgagcttgagagtggacttaatgagggctgttttaaggttttgcaataaataaacagagtaagcagagtcactaatattgataggcagagtggaaaagttctccaggggcaatattaaggctccaacctcagctctctgagtgctagtaaatccagaatgagtgaggaaattatgcagtctccaccaaacaggcgcttttctgtttttaccagagccatcagtaaaaagtgttaaagtgttggggtatgggggagtgaactacttttgtaggcacaactacaggagtacgagataagaactgaattacgttgtcagcaggaagggcatgctctatatggcctgtgtaatcagagattgctatctgaagatctagagataggggcaatactgatccaaattgccttttactcaaaggaattcttatgacatcataacctagcaactgattgcactatctgcggcctgtatagatgactttactaactagctggatataggaagatagtgttttagtctcggtatgtgagcaaaaaacccattctaggaagcgtagtcctggggtcatctctcctattaatactgttggggaatgtttagtaggaaaaacaaacaattgaactgactatcggggtgtctatgtgatatagttgcctctgagaaatagcttgctctatttcctcaatttccctttttgctgcaggagtcaaatacctgggagagtctagggctgtattgccctttaggatagaaaacagttttgtaacttatcagtagttatgcccaacgtggggtgaagtcaattaatattgcccagtaacttttgataatcatttaaggtgtgtaaatcgctagtatttaaccttttgaggtcttactgaccagaagttagtatgtatccaagatatttccaattgtactttttcaggtgctatgattaaacctcttaactgtgtattctttatgacagaggcatataaacttaaaagcactggctctgttggggctgctaggaaaatatcatccataaaatgaataatcttgcaactaggaaattcttttctactggggagcaaagcctgatttacatgatactgacacatggtaggactgaacagcatcccttgaggaagtactttccaatgaaatcagcgagctggcctctcattactgataactggtattgtaaatgccaatttttctctgtcctgttctacaaggggaatagtataaaagcagtcctttaagtcaataatgactataggccaatcttgaggaatcgcctcaaaggggaagggaggtcccgttgaaggggccccataggttgcaaattagcattgatagcctgtaagtcatgcaaaagtctccatttgccagaccttttgggaatgatgaaaatgggcgaattccaagggctgtttgacagttctatatggccagcttttaattgttcttccactaattcatgggctttttgtaatttctctctctttaaaggctactgttttacccaaataggattttgagagagccatgtcaggggtaggggaggaataacagtggccattattagaaaggtttgctgttcacacaatttatcaaattctgccctccagaggaggtactgactggcctttaaagttgttttagctagcactgaccagtcccatggggtgatatggaagttgtctgctatggtttcaattattccttttgtaaatgggctagtggctccgtttaatgctttttcttaccactttataagcgtcaaaagaagttgtctgctatggcttcaattattcctttcataaatgggctagcagctccattttctttaacgtttttttcttatctctttataagcgtcaaaagaaatgggttcatatacctgatcgccttgtcgatcttgcattactgggcaggctaagagctccccttctgatgccgcttggctaagacagggtcccaaagctgtagtgtatcccttgtctttttccaatttattggaggagggggctcaggcaaaacctctgtttcctctttgttatttttgcctgttaatggctgggctgagggagaaggaggagacggtagggtaggtgacggttccatctcccttacttttttaggcttttctgtgtagagtgggaccaaagcagtcctaactaaagcccataacgttaaagatgttactgagacccattgcccttgctcatgatgttaaaatttcttcccagagctctacgtctagtgtaccttcttccgagagccatgggttatgggaaacaacagtttgcattaggtcccataattgagcctgtctgaggctctgctaactttcagcatttgttttactacttttatatactgttgctgttgagctgacaactgttgtcccatgatgacaactgtcatcccatgatgatcgtccctagcttgagcaattcctttgaacttggaaatgctgaacaggcaccaatgacttactgactgcgcagtctcttcaccttcattttcgagggttccgtcgtgatctgttgcagcattcctcacacagggaatcacctgccgagtctgtcccacagactttggccgagtgacagatgaaaggagtactcagacacagatattcagtgagagagcaggctaggggactgccagcactaggggccgaagagagttagcagtccccttaagctggtggccctcacatttatttagcacaaatttaatgacaaaggcttggagcaaacacaatttgtgggcaataaacattgtcaacatcccaagtagacagcagtcctgtgtgtgaatgatcaaaggttggtttctggacacaggaataaacaaatttatctaggtaagttcctatacaactcccctgttatctgccctttgctctcaggcttcagataagaatttggctgccttcagccataatttctttctgaagcttttgcaaaacctctcggccttccaagaaggtttgtgtctttcctataatttctcccaccaccctgaccaatctcctacaaaggctgaagcaggaggattgcttgagcccaggagtttgaggctgcagtgagctgcgatcacaccactgcacttcagcctgggcaacagagcaagaccttgtctctaaaaagtaaataaaaaaaagagttgggctaggtttgaggtttattgttgctatggttacccccaatgcagcagcttccagttcctccaatgacaccttggactgagggtgcaggctggcctgccagagggattttctccttccatgtgtgctccctgctcagctttaggtcctccctttgtgaccctcagaaagggtcttcttcccatactcttgtctctctcctgtaacatttttacttctaactcaaggcttgtcagcttaccattggcaggtgggggaggagggaattctctgttctgatcaagtctcagtctctgtcaggccctttgtgtctctgattttggggttatgtcctccttagtgctcctgttcctcccccagttctgggcccagtgtgtattcctgcccctgcccagggaaagttttgttttgttcctgtttcattcccccagatgcaagggagcttcatccaagggggtgacaggatttggtgtccttccctccacagactaaggcttttgtccggtaggggatacagggaagggtctgggtggagcactgtgatcctttcacagtagctgccattgtcttcttccagatcttgagacattttattaaaactttctccaatcttctgtgtgctcccagtggggttcatggtgaaaaacgctgaaaagggtaaagactactgcagtctccatgacccagtccctcaccagtgtccacttgtgtttaccaggtaaccagtgcccatgtcatctcttccattttgtgcctgtctctccttagatttgaagccagttgattgtcttctgatctcagctctccagaagaccttttccagaagacctctccctgtgtatccacttctaaaccagtcacaactgcccgagtctcacagcagcatggtggatatcccgctgtccctcaaactggggctctgtcaacaaagaggaagggaggaatgactcccttgggaggagacaacaacattgcaagtgatctagtctttgaaaggcttttaagcaagggactgagataaaatttatttattatttttaagagagaggttctcactctgtcagccaggtctcactgagagcaatgtgatcatagctcactgcagcctccaactcctgggctcaacgtatcctcccacccagcctccccagtagctagcactatagtcacacaccaccacactagttaatgttttcattttttgtagaacagaggactcgctgtgttacccaggcctcaagtgatcatcgggccttggcctcccaaaatgctggggttatagatatgagtcactgtgcctggactagaatatttatttttgaaagatctttggttgcaggtgtcagatgaatcaggaattgagacgagatgggaaggcatcaagaccagttatctgctatgatactccaagcaagagaggatggtggctgggatgaggaatttggcaacgggaatgggaggaagtggatgcattcaagataaatatccatttattaaaagtagttgctttttcaccagagtaatacataaatatagttttaaaagtaaatactgctactatcttaacaataatttaaaaaatctcaaaataacatgcaactgtttgatttttcagttttaggcattagttccccttataaatgatgagagtttagagcttagaccgcttgtcctgttaccaacaccaccacacatgccagcatttcccatcactcctctttccattgtcatcatactgtaatcctggttagaccagtattcagtgtttccattatgactacgtaaattctaatcacagctgaaccagcagtatgatatttagttttccctcctttcataacttttcccattcctgctgagttaatacttttttggcttgtcttactctgctcagttttcattttgtaaacttttaaacatttgaactctagcaaatatactgagaagtgccccaaacgtaaatggagagtttaacaaataattatagagcaaatacaacatttaggtaccaccccaataaacacaacaccgaggacccccagaagcaccctgtgtatagtggaatgttgtgttgtttctggccatggagtctcaaagactgattctcaatttttgttgcttgaaaacaagtaaacaagtattctcagccgggcacggtggctcacgcctataatctcagcacttttggaggccgaggcaggcagattacttgatgtcaggagttccagaccagcctggccaacatggtgaaaccctgttgttttgtaaaaatacaaaaactatctgggtgtggtggcatgtgcctataatcccaactacttgggaggctgaggcaggagaatcgcttgaacctgggaggtggaggttgcagtgggctgagatcatgccaccgcactccagcctgggtgacagagttaagactctgactcaaaaaaaaaaaaaaaaagttggtgtaatcctttccacacacacatatatatatacatagatgttatatgtggttgccttctgttcctactgatatatatgaatagtatggctgattgcattattggtttgtttcttcattcccctgtaataagactaaacatacacaccctttgccatataacctcataaagttttcccaacacaggctctatgcttccctactgcactgatgttgggcttggctatgtgatttgctttcgccaatgggatgatggtgcttgtgacacagcagaggcttgaaatgtgcttgtgtgattccatttggtctcttctaagtttctgtgattcatgagaagagcacgccctgagtagctgctgcaacttctgccacattgggcaaacctgaatccaattcacatggaggtgtccagcccagccgacccacaacctgaaaaacagctgcttgggctgaacttgatctagatcagctgaactacatacagttgccttagaaatttgtgagactaagactagacagagaacaaaagcaaaagaaagaaaaaatttgtctgcaatgactggctaggaacctggacagattcctggcaacatagctgtgcaaaagcagccccacaagcaaaattgagccaggagacagggttctgatcccaggcatgggccttggcagctgaaacttgttaggctgggcctctccctcgccagttcaggcagcccctcctctgaggcctcatggaccattctctcttctccaagacttcaagattccttcctagtgagtttttcttttttacttttagatggagtctggctctgtcacccaggctggagtacactgacgtgatctcagctcactgtaaccgccacctcccaggctcaagcaattctcctgcctcagcctcccaagtagctgggactgcaggcacacgtcaccaagcccagctaatttttgtattttttagtagaaacagggtgtcaccatgttgttcagtctggtttcaaactcctgacctcaggtgatccactcgccttggtctcccaaagtgttggattacaggcgtgagccaccatgcccggcacctagtgagtttttctgttacttttttttttggaggcggggtctccctatgttgcacaggctggagtgcagtggtgaaatcatggctcactgcagcctcaacctcctgggctcaattgattcctccatctcagcctcccaagtagctgggactacaggcatgcaccaccatgcccagctaatctgtgtattttttgtagagagggtttcatcatgtttcccagaccggccttgaattcctgagctcaagtgagtcgcccgcctccacctctcaaagtgctgagattacaggtgtgagccactgcacccagcctgttaaatctttttttcaattaataacaacttcttttacagacagggtctcactctgttgctcagtctggggtgcagtggcactatcatagctcactgcagccttgaacccctgggctcaagtgatcctcctgcctcagcctccagagtagctagcactacaggcatgtgccaccacatccagctaatttttaattttggtagagacagggtctccctatgttgcccaggctggtctccaactcgtggcctcaagcaatcctcctgcctcagcctcccaaagagctgagattacaggcatgagccaccacgcccagcttctgtgactttaaaaaaatctttttagacagggtcttgctctgtcacttgggcttgagtactgtggcacaatcacacctcactgcagccttgacttcttgggctcaggcaattaattctcgtcctttggcctccccagtagctaggacacaggcgcacaccaccacactcagctaatctattttttgtagaggtgggttttcgccatgttgtccaggctggtctgggactcccggctcccaaagtgttccaaccacaggtgtgtgggccttccgtggtatcttaacctcatcacccagaggcaacaacagctagtattcttctagtttttaccacccccaccacctcaatcctgcccctgtagcctttccaagtgccacagcattgtttcagtttctatcttagaaagcccgggagtctgtgtcctatctccctgggggcattcaaaccctagtccatagcctgaggcccacctatacccagacccagtgtcttggaagcactgactttaatacccacttaggctgggcgcagtggctcacgcctgtaatcccaccactttgggaggcttgggcgggcggatcacctgaggtcgggagttcgagaccagcctgaccaacatggagaaaccccgtctctactaaaaatacaaaattagctgggcgtggtggtgcatgtaatcccatgcctgtctcaaaaacaaaacaaacaaacaaaacaaaacaaaacaaaaaaaccccagttacattcaggatgaattctgccttcctttttgccaccttgggatttccatttctttctctgaaataggcatttgcatttttcctaggattttttttttaaaacagttggaattatcccatatacacaattttttcacttttctaattaacatacatttccccatgggcttgtgtctcacctctcaatccccagtgtatagcaaagaccaggctcaggggcacttacaaatgtttgttgaaaccaaagacatcctatattacagaaatgaactttggaaagaccagtcagcgtgggtgggtgaggaatgccagagacgggagaacaaaatgaggtataccgtcaggtttgaagggttgagggttatggagggttcttcataggaagttcaccatggagttcttggaactgttcaacacacagaagcaaggtcctctccttctaggtatggctagaaatgtttatcaatagctgagactctgattcccagggtgggatcaggaagccagccccagctgctgcagcatttttttccctttttctcattacaggagccaagaaaactgtcaaagcagatgatgcaagagtgaagctgactcagaaatactcaatccccccaggaacttctctaagaaatggactgaccatcctgtaagcttccatctggaggtacctggggaagggcttctcacattgaggccaataagaatccctagtgggccaggtgtggtggctcatgcctctaatctcagcactttgggaggccaaggcgggtagactgttgagctcaggagttcaagaccagcctgggcaacacggcaaaacttcatctctaccaaaaaaaaaaaaaaaaaaattagccaagcatgatggctcgtgcctgtagtccctggaaggctgagttgggaggatcacctgagcctgggaggttgaggctgcagtgagctgtgatggcgctactgcactctagcctgggtaacagagcaagacccgtatcaaaaaacaaaacaaacaaaaaacttctagtgagtagagcgacagggagacaaatccagtttgtaatttgctacagtgcaaaatatctggctttccatagagggagtgggaacaaggcaatgctggccttcattcaatcagaaacttgacttgtacccgttgaaaacctgtcatgtttaatgcttggatattttttcttctagtaaagacactttactgccacctgctggaaaagagtcagaaattttccaaatgcaaacatctatggcctccctataatgtagcatccttttactgtacatagtctgcacaactgtacaatttagaagagaaaccaacatttggtgtaactctaccatataccaggcatctgtcatagaatctgaacaaccgctctatgaaatcagtacttataccccaatttaacagataggaaatattgggacctctggggaagggaggaagaagagggtatcaccaaaaaagggcaaaaagggggcttggtctgtattggcaatggaaattcaacttgggtggtaggattatggatgtgttacagctttctttataatttggtacatgcctaaaatgttttacaataacaatttaaatcacctgtgaagaaaagattcagagaggttaactgatcaaaaaaatcacactgccagacagaactctgttagaggtagaccacttgcagtaacattacattgcttctctaatggttaaatttagcacagaatcaaaggagagctataaagtctaggaagtacttatttacataggattgagtccagaacatcttgtgacaccatctacatatgttttacttggagaatagtctgaatttcgtattacacgttgagcatttctaatttgaaaatacaaaatcctcaaaaatctgaaattttttaagcatcaacatgatgcctaaagtaaatgctatttggaatatttcaaatttcagattaggaatattgaactggtatgtattccgcaaatattccaaaaatccaaaaaaattcaaaacacttctggtcccaaccattttggataggggatattcaacctatattacacacaggtaatacagcaggggaaaagcagggagactgcagcatctaagtctactaaattggccaggatcattccttagtcttcagatacctatttatcagggtctcattaaataaagttacttgtcatgttagttcagtctggcctgtggcttgtaattatagctgcaaactcaagggcaaagttcttaggattttgagatgctctttatgcaacaatacttccatttactttgtgtgtgtgtgtgtgtgtgtgtgggtgggtgggtgtgtgtgtgtagggagagaaagggggcaatggagtggagagtggaactacaatttattaagcacctattattacaagccaagtagggtgttaaatattttcctcgtgccattccattcaatactcttcgatcctgagggaaaacgaacccacttaaaaaaaaaaacaaaaggttttaatgaggattgcataagacatgcaaggtcaccagggagtttacatgcaagtggggagatacaaaataatacaacaaaagttcaggtgttctgaggaaaaagaagggcaagggtaagtgatgacagtgggggaagtcggattcaggataaaccaattttagactcattttttgaggaaggaactgagcatgaccttaccacacagcctttttagttaagtgtttctttaactaggaaaaggccctgggaagacaggctctctactatgcaaacccaattccagtcttgggagagaatttgctggtgggacaaaatcaggtttttcaagagatgcttaaatggtcaattctaattataaccatacttgtcaaaaggtgaagcaaagatgaaagttaaaaactaagaagaaattaaaattcccaaatctgtcaaccaatctctaattttctctgctactttaggactatagtaattagccataccctgaggatctactttacaagatatattcctctgacagtcccactctaacaatttaatctatcttatgtaagctggacaggcatttcaagtacaagaaacagaattcaaaacgtgaaaacggagccatctatcacacacggtgtcggttggagaagcatattgctcaggctgcagggacatttcatttatttaaatgtttttattaaaaaaaattaaagaccttcatggcacaacttcttcccagcacagttatggtttagtcataccaattacaatacaattacaaccaataaagcaaggtggggagggccttctggcttcaaacttaaaaaaaagcagaggaagaggggagggaccacttcaaacaaagtttaaaaatactttaaaaaatctttcagagtaattgccaacataacctttcatgttggccattccatttcctgccatctaagcaatgcagacacaggtagtgctgagaaatagtgtcccaatacaaggtatacagatgaggtaatttacaacaacacgtaagttgttactctgtaaacccttgcctcccccccaccccccacccaattgggtcttttttttttttctctctctccatgcttctgcagtgactcttaagtagcatttttaaaaacttctatttattttaaaaggctcttgggtggcacctcagagtcctctgcattcaccttcggtttattccaaggtctgatgggtgtaaggaggtccagctgtctgcagctctccgcatcagcctaagctacacctcaatttccgagctacaaggatagggtatgaagtcttgatttacaaccctctccccacctcaaaagaaagaactcattagttataagtgtcctgttcaaatcacaatccagtgcaaacataatcacaaattgcatctctggcacatctggtgcttttagcttctgcacaaattcaacatggtaaccctcacagcattctagggcataaaagggtcaagtacaataaatatccactgtaagtggtcataaggaagaaaatcaccctgccacacagtcagaatgttttcccttcagctctccctaccgttgagaagcgctataaaaggaggctttagcgtcctctaaagtttaccattatattcactaaagccaccaccttgataaagttactaaagccaagatgggttacaaagttagataagttcattaaattcaactccccaaacaattacgtttatctatgatgcctaggcgagaaaggcctgtgaatctataaggtaggagaatggggaactaagattttaggccttaaaatatgttggaagaatttttcctagttcccacaagcagctactgtaatgaaataacaggagaaaatacagagctgatggttttgctattgtgcttaaaaaactaggcttcctcagtgaagcacctgataaacttaggtggttggattacagtggaaagtccactttacacacacacacaaacacacaaaaactggcgactttttccatccccaatccctgcactgctgagacacaaaatgagttttatggcaaaggatccttaatccccagagacgctttggcttgtggtgctttttttttaaggcctctctgctctgcccggtaccatgggtcgaacgaggggtgtataaaatgggggccttgggaagcctccacggtacagggctgcaggcccctcagatgtgaacatgagacacccacccagcaagacctttacacagggaacttaaatctaaccttgataaataaaaccaaacgtttatttacaccaaagaattccaacactggatctttcacatatgaaggacaaagtattatatatatacacacagcaaggggtggcggggctgtaacaagagagtttatagttttcccacaattacaggtctaccatttcagcttcaatggagatagtggctctgctcctacctctcaagatacatttacaagactgaggagcaggtcttctcactggatggcatgtgagggaaggggacggtcggaggaaaagaaggtagaaagcttaaaatggaagtcagtgtggccacatctcccattagctctagcatgaaacctgtacagacaatgtttgtttcttttgtaaaaagcagtaagttatgcccagtaactaaatgaattcaaaatggccaagacaaagaaaactaagaaagattttgccttccctctcctaccagctatggagcacagcatgttgggagatgaacagggaaaagaccaaggtaaggagcctgggagggaaggtatcaacattttaaactgaactaaaaataaaagtataaatgagttggatttagggttagatcagtaagacatgattcttactgaacagaagtttttagtatctgtctgcattttgggtagattttcaacatcttgatgtaactaagacacacttccacaagagccactaggataaccccactgaagcgcttatggagtaaagtgatgtaagcgaccagcaagcagtccactgctcctatagattgggtcctcccttccttctttccttccttcctttcttcctgcctcccctgagaagctacatttttgtaatctctggagaagagcacgagataccaaccccctaaagtgtgggacggtggaggaacaatggtgggaatgggaagaagtctccacctaaatgcagcagccgggattgaggctggtttatctttgttcttttgtgatgaggaactaaatttgggaggggagaaaaaaaaatttgtccatgaaatattccacctgcaggtaatttttcagggaatcccctgagttatgaaaagttcgagttaaaaaaaaaaagaaaaaagaaaatcagcctattataattttttttttatgactgaactactataaatccacaagcaacggttcagacacggtgcttctgaagtgtttcacccctccccgccaggcgcaagctgcatcaaggagagggtggactcccccacctctgctcaggcatcaggagacagatagggccgttactgctgagcgccagcggcagctggaacaggcatcccaagggggttggcagcagcaatcactggtgagcctgccagaggtccaaggggtgaaggggttggcactgaagaaatccctgaaagaaaagagctgtcagtgagccaaagacaccaaccatggcaatcttaccagtttctcatagcactcactgcaaaaggaacacaataattctttactgaagacttcctcttagctggatttttacatatacttcaagtctgaccctcacaaattcaagttaaagtggcaagtcctaatcaatttaagagacaggtaaagaaatctaggcttggacaatttaaggagtttgtccaaagtacacgattaagcaagtggcaaccatggttggattctaacccaggcctgtctagggcagagatgtccaccctggtgaccagtagccaaccacatgtggctgctgagcacttgaaatatggctagtgcaactgaggaactacattttaaattttattcaattgtaattaaatagcctcacgtggctagtcactaccatactgaacagcacatgactgcagtcaaagctcatgtgctcttacaccatgctgtcttgatagctggcagctttcaaaattactgaaagtcaatttgaatggggaaagagcattttctaagataaaattgtgttttggaatttatttccatttgatttcttccacctctctaatcatgtttttgtgtgtgtgtgtgtgtgtgtgtgtgtgtgtacacacaggtaatacattcacatggttcaaaatacaaaaggttcaaaaaagtatacaaaggccaggtgcagtgtctcacgcctgtaatgccagcactttgggaggccaagttgggcggatcacctgaggtcaggagttcaagaccagcctggccaacatggtgaaaccccatctctactaaaaatacaaaaattagctgggcgtcatggcgggcgcctgtagtcccagctacctgggaggttgaggtgggagaatcgcttgaacccgggaggcggaggctgcagcagctgagattgtgccactgcactccagccttggccacagagcaagaccttgtctccaaaaaaaaaaaaaaaaaaaaaaaaaaaaaaaaaaaaaaaaaaaatatatatatatatatatatatatatatgagaacattattatacattcttctccactcctcttagacatggctctgcatctcactttttcttttgagacagagtctcactctcacccaggctggagggcaacggtgcgatctcggctcactgcaacctctgcctcccaagttcaagcgattatcttgccttagcctccaagtagctgggattaaaggcgccgccgccacgcccagctaattttttgtatttccagtagagacagggtttcgccatgctggccaggctggtctcgaactcctgacctcaagtgacccacccgcctcagcctcccaaagtgctgggattacaggcatgagccactgcacctggccctgcatcttgcgttttaaatttcacattattatattggagttggagatctaacagaacatgaaactcttattctactggctgcaccacattccattaaatggatataccataactgatttaaccagtttcctactgatagctattctcaatgttttgttattacaaataaggctacaagtaagtttggatatacattactctgtacagaggtaggatactcaaggggtaaattctagaaggcagttagttcttttcttaaaaaagaggagggcaacagcaattatttgaggatatgtaagtaaatgccttcactaccagatatgcacccacttggatgttgcctatatgtataattcttatgctatgtgcctgtagttcctttggaataactgggtactctataaaaattcactgtgcgtcacaatgatccaataatggaaaaccattttacttatgtttttacaactgataggcactctatagttgctctggcacatgtcacggaactgtccttgtacacatacacacctatgtataaaccccacctctataccccatttcttaacattgtttctaagggccatgtaactactgtcatttcaaactataagatgaaatggtgtatttttccttttcatggcttggcactttcaagcccctatgccaaaaattttcagccaggaatgctgagattctagcctagaaggggataccctactcaagacagtatcactaaagtataccaaatgtcaagcatgctgaaacctggttaaaaaaaagtcacaaggccaccagtacggagaagagaaggtatacaagaaatcagaccacaaagctaagaacagtaattgacttccacatttttttaaagaaaatttaccaatgaactgacctgacatcatattggcgctgctgacgggcgtactgccccctggcatgctagatgaacccattcgagcctggtccttcacaacagtgtctagaaaagagacaaaaaggctaggttctgttttgcttgaaagattaaactaatggtctggaagcctgaaagcagccagcttcattctttgcaatttatatatactctacattattccccaaagaacttaaggtggcaattgccttcaccatgaattagacaagtggtaaaaagcagaaatagctttcctatcaaactgtggtaaaagctaacctttcaatcaaatggtagaaagatgaggtaattatttatagcagagcgaatttaatgaagccctggtcctgttgaggtttaatggagacaagacactgtaactcggcaaagacggtaatatattaccagtgtgtccacagcccagtaccaagtaggccaaagctataggtccatgtagcttagggctatgaccacattctctatcccaatcagcctatctatctgcttcaggtattgggcaaaagtataaatgattcagtacaaaaccatcacaccgaaggaaaaatgtcatgttgcagctaacatcacagtgcagatggggtgggtctcagtggtattttcacttaggatggcacaggtggctatactcacaaatctaagtcaaggtgttcatacaattttaagatttgtaagcctcattagctctttccaacgaatgattactagggacaggaaagatacagggctgtgtattctaattcaaccattccagactgaggcactgagaagtgtcatcctcacagtatgaaaagagtttatttaggaatgctcttgtgtcatgtattctgttacagaagaattcttccagtaattctgcaatgtagttgccatcactatccccactggaagaatctgaggctcagtgtgggtgaattaactttgcagcaagctgacaggagctgggattacgactctgttctataggactctgcgcctgcacaaactctgtgggctagatatctggactcacagaaataggggtgctccattgcctctcttgcagtaagccgtgactggtggtcatatcgcagcagtttgtccaggaaatccaaggcctcagggctgacaaggtgctgattttcactgtggacaaagcgttcccatcgctttcgagagtgtctgcaggaccaaaagagggcatgagaaatgggccacgtgggcacagaagcccaacatttcattcctacatttttcttagtggctaacagcccagacaaaagcaaagagggatccaaactcaagagggtagtcttgcaccgctctgccactgagtgggacaacaaagctaactggagactggaaacaacatagctagagtgaaaaaagacatctgagtcctctcaattttaagaaacataattcaggttacttgacaggacgtgaccgcttctgtgtagcaaggagggtcaggtggctgagctcaccaggcctatttcccatccccacacatattcctggcatctctgccaattggccagcaaaagcctttgcatcaggaaagtccatctcctcctgttgagtggttaagtgtataagtactatatctagtcactactgttaagagtcggttgtctgcatatagcctttttttttttttttttggagacagggtctcactctgttgcccagactggagcgcagccacatgttcattgctctctgtagcattccctcctgggctcaagggaagctcctgcctcagcttcctagtagtctggactactgccacacatcaccatgcatggagtcgagggtctcattatgttgtccaggctggtctccaactcctgggctcaagtgatcctcctaaagttctgggattacagatatgagccaccgtgcccagcctgcacatcagtcttaaagcatgcattttctacttcaatttctttctcttggagagaggtttttcacttaaagaagcaaggtaaattttgatttttgcctcaactgtaacccttctactagaatctacattcattttgtaggaatcctctagctataacccctccatcagactcctgtaagttaatttgaataaagggccattcaatccaatgcctttatcagaggcctgctcaatgcagcatcctgtggcactggaccactgacatcctgacagtgctggcaaagaaaacataactattttgaagatcctaagtgccagttcactctcaaagtgcttaagccacagatgcacatattttgtttcatgacttacctgcccaagatatcattgaaacgtggatctaattcaatgttgtatttgtcaatatagtcatataaatcttctgtccccagaaccttggctatcctcaccaactagtattaaagaaagacaaaaacccatatcacaagcatattatattaacaaatcaacaattaacaatgattgaatttacataaacgggtcatcatgtctacaggtatgaatgctacctcctaacagtttagacttcaactcaatgtgatagtgttagaaaaagcaaactactttataaactggtttcttcctcttgaaatgtcaccctggtgaacccttatttttctcccctcaaaacccaattgaagatgtcacttcttttgggaagctcccattgcacactcaaactactcaccactactgccttttgtgccttgtccacatttctactctgaagttatgactgtaacctattttgttgtatgtttgactcccttacaagatcagctatgaactatctgaggggaagaaaactattctttcttttttctgtattcctcagtactgcatgcacttgatacagagttattgactttaatggaattcaggttgtattctttgactcattaaaattggacatggtgctcaaagggaacaagacaatggtaccttccacaaggtcctagaatcattccaggttcttgtgaatgaaagagccctttgatcttcaagggggaagtggagttagtttaagaaacatctgtaactcaacccatataaagagccaaaaggatcacagaaataccacatatgggctcacatattggagaaaacaccatattggagataagggtttattaggagaattctaaggtaatgtcctattttaaaaatctggatgacaatttatatgtattcttcacaataaaataagcaatgcaaatgacaaagactaggggggaatgtctgatttcaaaaggctaagctggtagctcccgaaacatcaatctaaggatcaatatcggggtggctgaataaacagtgaactgaaagttacaggcagtgctggctatcattgcattaggccagtacatttttcaatgggtataacatatattacctgatcataattgtcatgtccatggaaaaatggctccttccgaaagatcatacttgccagcatacaacccaaactccacatatccaaactataatcgtacatctgcataaaagtaaactcactgttattatctgtgaatcctcaggcttgtcacttcaaaataaaaaattaatttttaaaattaaaaaaaaatcactccactgactcaaaatcaaaacactaataacatcttcatatatttctttttagtctttcttttttttttttttggagacagagtctcactctgctgcccatgctggagtgcagtggcgcaatcttggctcaccacaacctccgcctcccgggttcaagcaattctcctgcctcagcctcctgactagctgggactacaggcgcgtgccaccatgcctggctaattttgtatttttagtagagacggggtttcactacgttggccagtggtctcaaactcctgacctcatgatctgctcgcctcaggttcccaaagtgctaggattacaggcatgacccaccgtgcctggctagttttttcttttttttttttttttagttttttttttagttttttcttttatgcatctttcactcggttttaaaacaatttttactttttttttttttttttgagacagagtcttgctctgtcgcccaggctgcaggggtgtgatcttggctcattgcaactcagcttcccaggttcaagcaattctctgcctcagcctcctgagtagctgggattacaagcgcccaccaccgcgcctggctaatttttttgtatttttagtagagacagggtttcaccatcttggccaggctggtcttgagctcctgaccttgtgatccacttgccttggcctttccaagtgctgggattataggcgtgagccactgtgcctggctcttttttttttttttttaaagacacagggtcttgctctgttgcccaggctggagtgtagtggcgtgatcatagctcactgcagcctccaactcctgggcttaggcctcctgagtaggtaggattacaggcatacaccactatgctcagctaatatacatactattttgaattgttttcttcacttacatgaaaaaaaaaaaaaaaaaacctccaaattgttagcccatggagaccatctaatgtgtatcattagtattttattacataaatgtttcagaattcaatctttaattttcctataataggacagtgttctgtttttcacaattattagtaatactgtaaaaactatttttatgcataaaatgctttttgaactcagggctatagccttaagaccccaagaaagaaattcctacaagaacaaaaagtctgaaacttttaaaatcaactgataataacctggaaagactgggcataaaagatactcccaagaaaacttcagatttttaaacacttggcaaatctattattaatttggttcctttctcctttttctgtgaggagaaagaaggctttttgggggagctggggagaagacctttttatttagtatacaattcagaagaacaagaaaacattcttgaatttactctgaagattggttaaacttagttacaggatgggcatggtggctcatgcctgtaatctcagcactttggggagccaaggtgtgaggatgggttgtgcccaggagtttgagatcagcctgggcaacatagtgagactttctctctacacacaaaaaaattaaaaattagctgggtgtggtagtgcacgcctgtagtcccagctactcaggaggctaagctggaaggatcacttgagcccagaagttcggggctgcagtcagctatgatcatggcattgcactccagcctgggcaacagagcaaaaccctgcctcagaaaacaaacaaaaggccgggcgtggtggctcacgagggcaggagatcgagaccatcctggctaacacagtgaaacccagtctctactaaaaatacaagaaaaattagctggggtggtggtgggtgcctgtagtcccagctacttgggaggctgaggcaggagaaaggtgtgaacctgggaggcggagcttgcagtgagccgagatcatgccactgcactgcagcctgggcgacagagtgagactccgtctcaaaacaaaaacaaaaacaaaaacaaaacagcttacaattcaaaacagttctggaactgctgattatagaacatatctttggctactttccctcaagtcaggatcaaatgcaaacctattcatattctaccgacattatgacaataaaagtaatgtaagtcatggtacatgaattaaggtgatttatattttacatttcatataaaaaggacagctgtgaatgtgcattaagtggcctacctaaatgcacaaaatgatacttttttttttttggtaaattatgtgcgaaataaacacaggatcaaaactgtgcctgcccttctgttcttacctgatagtctacaagtagctcaggacctttgaagtatcgggaagcaactcggacattatattcttggccaggatgataaaactcagccaaaccccagtctattagtcgtagctgaaaaagaataaaccatgagcaatcttatctttctctaagctacccacactgtgccattagcatactcttgataaaatataccagacacgtcactctttactgaaacccctccactgactacttatagcctttagaatgaaaataaaacttcttagcttgacaaacctctttctccatgattttgttcctggaagacacaatctcacctgtgcttttacaaatttcttaaactgctcaatgactaaaatgtccctactacccagcctataatcctattggtaagcatttccttaacttttggaatatttaagtcagcttctcaatgaagtctgatcattgccttcagccccctgaattttagatatatttctttaacagaacctaaactctttatgttttctacctttctttttcaatatggacgacaagctccttaggggtagggactgttttattcacctttgtaattttcagaattcaacataatgcctggtatacaggagaaaaatgaataaatatttgctggatagatgaaataacagaaaagtcatacaatacagcttttaccaaaatgcatcctaaacatggaaaaaggggtaagaggcaagcttatctgcccactgtgcatagcatgaccatgatctgaagtgccagcagtaggccctgaggaaaaacatcggactgctctggcactaagtttactgcctgtatctcaaaactaaacctttgattactccctgcaaaagcacctccactcagtctccccctgttcggttaaaggtgatactcatcctgtcatacaagccaaaacttaagattcaccctggattcttgattccctcagacctcacatttaatctgtcaaaaaattctgaaggttctatcatattgtgaccattatcatcacctccactgccactgccccgatccaagccaccaccacctcttgtttgatatattgccatagccccttctcctaactggtctcactgctttcactcttgccctctagtctaaacagtttaataaatactaaatagtttaatagttattttaaaaataattaaatatttaaaaataaatataaacagctttttaaaaggattgttcaggttgctatggagagattatagattcacaggaaattgccaaagtagtagagattctctgcaccctttacccagtttcccctaatagtaacatcttacataactacagtacaatatcaaaatcaagaaactgacactggcacaattcagaaagatcttattcaggtttcaccagttttacatgcacgcatgtgtttgtgtgtgtgtttctatgcaatttcatcacatatgtaagttgatataatctcctcaacaagatatagaactgttccatcaccacacacatgtcctgtgtgttagcccaacccctggcaacccctctgctctttatctctatcattttgagaatgctacaaaaatggagtcattggcatataactttttttgagactgccttttttcactaagcatgagatccatccaagttgttgcatgtgtcatacttctttcctttttattgctgagaaatactacttcataataatattatatggtatggatatgccagtttgtttaaccattccctcattgaagggcacttttccccatttttttttttttttttttttgagacgcagtctcgctctgtcacccaggctggagcacagtggcacgatctcggctcactgcaacctccgcctccggggttcaagcaattctcctgcctcagcctcctgagtagctgggattacaggtgcatgccaccaggcccggctaatttttgtatttttttagtagagacagggtttcaccatgttggccaggctggtcttgaactcctgaactcgtcatctgcctgccttggcctcccaaaatgattacaggtgtgagccactgcacccagcttttccccccaattttaagctattacaaatatagttgcattcatatataggcttttgtgtggacctaagattttgttgctctgagataaatgccactgcaggattgtatggtaagcatatgtttagcttttcaagaaaccaaccaactataaaacaatagttaagcattttccaaaatgccaaactttgcattcctaccagcaatgtatgagagatcaagtttcttcacatttttgccagcacttggtaccatcactattttttattttagctgttctaataaatgtgtagttaacttttaaatttcaagtgagaacatgctaaagcttagaatatgcaaaagctctctatcttcagagaaaaggcctaacaatgaccaataaggttttacatgatttggttttacctctttgatttcatttcctccttctttccccgcattcattctgtcccagctttatccttgctgctgctcttccaacatgccaaacatatccttacctgaagggcttttgtacttgctatttactctgccttgggacatgtttcttcataagactgcatggctgggtccctcccagtgctctctaaaatgtcacctttccaatgaaaccttcccttataactggtttaaaactgcaaataccctcttgccattccctattcgttttttcttctacatcaaaataactttctatcccaccagcctccctaaatgtagctcctaaaagacaagcatttattgtatgttgagttcacttacatatccccagccctagggtggtgcctctgacatggtgtgtgtctaaaagtaattcagttgcataaataaatcacctgcctccccagagaccacaacaggcaagtcatcacagcttgtcaccttaaaaaactgaaatgctaaagcatgtggccattacagctctcatgtaaaagcatttgcagacaacagggcccttatgacatccaataaacagaaacagcattttctgtatatctcgtccacttaactgtgcacatttaattctcacgaatacctagtcgcctgcagggctattattacccacactgtacacgtaagaaaaagaaggcaaatggagagaaagtagtttctcaggaaaccagttactcaataaataaggcgagaagccacgtttccgggcttagaagatgaacattttgcccactttactcatgtttccttcttgggaatattcttaggaatataaataatggttcaaacatgttgacttgtaaattcgtacattcattcaccaaatatttctcaactgccgaataggtactagggcctgtgacaacacaagggataaagtgttgaagatgggcaattagctacatcatgtagataaataacacttgtcagcctatcactttacctttctgtgctcatgatcaatcatgacattatggggcttgacatctctgtgcataattcccatgctgtgacaataatccagggcctgtgggatgaacgggtcagaaaggagttagcctgaataatacgtaagagtcctttacttttccctccatgtaaattttccttttagcctcacaatacccctgggattcaagctgaggacacagtcacttccacagcaatgcttcagagacttgttcatgatctcacagtcaagcaaactcagctctctgagcttagagatctttttctgacacagttgtttcaacatgttttctgtcctaaaagacccaaagtatacccaaattgcaccacttcaaatttttctgtcttgtccagatcctagattatttccacagacccctcaaagaaagaaaacagatctttactacaaacctcttattctaagaacagtaattctttagccattaagagtctgtaacagaggttggcagaccacaggccaaatttggcctgatgtctgcttttgtaaataatgttttattgcaacatagccatgcctatttgtttgcatattgtttatggttgctcttgtgcaacaacagcagacttgaatagtgtgacaaacactacatggcccacaaagcctaaaatatttactatttggccctttaaagaagtttgccaatgcctgatttaggtcatcaaatccaatctgaaatgtttccaacctcaaactaaagggaactgagtagtataatctttggggtttgttaatcccagcctttcagtcagccgacgttgttggccaaattcttgtccttcctgaagggcaacttgggttcctacagttcccagggctgggcaatcatatctgtaactttctaaagccttgcttgccacaaactgcatgagccaatggaaagatcaagtatctctgctggcacaatctcctcaggggatttctaaggctccaacagcaggctttatgtcaactcttgtttagtaagaaagcttagccaacttttagcaattctctcttctaggaagctgatcttgtggctactgggaacaagatatttggtgaccccactttagaaatgtaagtaaattttcaattagcatctataagcagaaatttacacaatccttaggacaattaccctttgagaactgagttaaagtttactgttttatttgctgactcttaagtgagataaagtataccagaagctagcacgtcaggtgttttcacgagttttgaaaatttaatattaacttacataggggccacagaaattacaaatatttgttaaggggtcagtcccagctatcttacaaataccctttttcaaattgttctaaattatactcccactagaccccattccataacccttagcacaagggttctgatactattattattaatttttatttatttatgtatttagagacagggtcttactctgtgctactgcactccagcctgtgcaacaatcatagctcactgctgcctcaaattcctgagatcctcctgtcacagcctcccaagtagctggaattacaagcataagccaccatacccagctaatttttaaattttttgtagagacagggtctcactatgttgctcaggctggtcttgatctcctggcctcaagcaatcctcctgccttggcctcccaagtagctgggacttacaggtgcacaccaccatgcccaggtaattaaacaatttttttttgtagagatggggatctcactatgtcacccaggctggtcttttgatctcctggcctcaagcaatcctcctgcctcagccttccaaagtgctgggattacaggtatgatactattaacttattaaaaacttatatagaggtcccttctttcaacatactttacaaagttaatctgctggcttttctaccatcaattgactatttaacaaaaagaagaccaatttaaaaaatatttagtattcaaggttcacttaccttcagaatctcatacatgtaaaatcgaatatcatagtctgttaacgtctggtacaattgctgttaaagacaaatgtttgagccatgaaataatgctgacagaaaggcatttttcaccctcactcacagtaattcaaaccaagacttggctcatttaccgttgttccaagatctgtccattcactgccctctatttctccaacattacattaactttaaagagatactttgggtcttcaactcttaaaaatgaagaattacttaaacatatattgcggaagctataatccactgtcagaaacatactgatctagatacgttaatatgcactgacacccacctataatttagtttgcttttcatgtatcttcagaccttctcaaaagaggcattttggcaaatatactgcctccttagtagggaactaactcatctttgccttacatagttggccctgcagatcaccagtgggtatgcagatggcatgataccaaacctgttgagtcaatttaacaaaactattcttgttccaattggaaagtaaactctgaacaactgttatgtatcctttccagtttccaaagagttgcagaatgttttttacatggacatatcttttttttttttttttttttttgagacagggtcctcactctgctgcccaggctggagtgccgtgctgcaatcataactcactgcaacctcaaactcctgggctcaagcgatcctcctacctcagcttccccagtagctaggactacaggcgaaagccaccatgcccagccacaggtacgtctctttaatggttagcaacgtcttctgacaaagtttttcttgaaattatcattctgactctaaagcagttcctcttcctttctccctatctctgcaacagaattcactaatttattaatatataacattctggatactggactggtggaaaggcaaatcgaagatttttacttttactccaaaagagtagctatattcttctgtaaaattggaactgtgtgaaataagtaggccactggatagactggaattctgagatatctcttatagaggtttgtgttatggcagaatttgacattatccttcctcgatccctgccttttaagatctatagcccacagtttatgaggaatcctaagaaataagcagtccctacttttatacatacaatatatttcttcctgaacactattgtttaaagcgaattgccatatggccagatcctaagtgaacgtgtgttactgccttcattaggttggacatcagcagaaactgtcaactaagtagtgagaagtcaatgtgttggtcattaaaaagaacattaaacaaatgggcaaaatatcaagatgcagaaagtgggcactgcttatataggagttcttctatcttaaaatttgcactgtaaggatgaaaagctttttaaaaacaaatgcgaagcaagctcttctaacagcatcatccccaaaggctatgtggtctaaaaacccactagcccgaaacagttggttatatattataccttgaagtctgtgttgtttacgtgttcaaaaaccaaggcgggggttcgtgactaggggaaaagaacaaaaacaaaaacacacattagcaatagccctgacagctttaatggggacaatgtttgcggatgctgcgtggtgaaatttggcagtcctcgcctcagtagtaagaaaccctctattgctacaagccctccccgctctgatcatcaccgcacttaggtcatttttgggatggatttcaaacagaagacatggagctgaagtctcaccaggctctaggcagcccgacaatgcgcccatcgcccatcggcatcggacctgagtttgcaaaatggattaacacatttcagtttccagtgctatcagtctcttagcctagaagaataagaaatagtctgtgggtggaggtctctttgaaagaaagacccaagctagttaaatggtatatctgattaagcactttcaaagcaggacttaatgatgagggttgggggagggaacaaaaagaggccagttgtgctccaggtcaaacaccatctcagctctggcgggccttgctaacacctactatactcaccacagggtcttttacaatgtctgccagtgtgatgatgttgggacctcctctcaaattctccaaaatctttatttcacgcttaattttcttcttttttactggctgaaaggggaaaagtacatcagcaaaaaaaaaaaaaaaaaattttttcagagtatttcaacacgtagtgtaatacataaatgataaatggcttacttatgagcacaccttgaaggaagaaaatgtgtcacattcgtctctgaatccttctcctagcactgtgccaggtattctgcaggtacttacaaatgttgaattgaaagaaaaaaagatttctattccaaagaccagacacttctgcagaattagcatttcaatcatcagtcttgatgttaatgttttaaaacatgttaaacatgttaatgtcttaaaaccttacaaagtagcaatttaaatcgttagtaatactaaagtatatcaaactttttatcaattaggatgaaacatgggccctttccatttcttcctctaattagggccaacaacaaggatggccaaaacatctttgtgtagcacaaccctgagggtaaagggtgagtcttggagtcacaatgcccaatgtgaaacctacctttactacctgctggctgttaatggcaaactacataacctctctaagcctttcattaagtgtaaaatgagtaacaagagtacccatctcataagattgttgcaagaatcaaatgaggtattcgaaagatttcggaatatggctgaaacataacataataataactgtctagcctgatcaccaatgctcttttttttttttttttttttttgagacagagtcttgctctgtcacccaggctggagtgcagtggtgcaatcttggctcactgcaacctccgcctcctgggttcacgccattctcttgcctcagcctcccgagtagctgggactacaggcacccgccaccaggccaggctaatttttgtatttttagtagagacggggtttcaccgtgttagccaggatggtctcgatctcctgacctcgtgatctgcctgcctcggcctcccaaagtgccaatactcttataaatgaacccctccattctaaagagtattctgcagagcatatcttaaacattcctttgtccttacccattctttccacatctgttctagtatggaatccttttcatttttttctgaggagggccttggtcccactgcacctcctttataaagcctttttttttttttgagacagagtcttgctctgtcgcccaggctggagtgtagtagcatgatctcagctcactgcaacttccgcctcccgggttcaagcaattctcctgcctcagcctcccgagtagctgggattacaggcgccagccaccatgcccagctaatttttgtatttttagtagagacagggtttcatcatgttggtcaggatcgtctcgaactcctgacctcatgatccgcctgccttggccttccaaagtgctgggattataggcatgagccactgtgcctgggcttatattataaagccttctcctgaatagtctaaaacagtgctggcccaaaggaaatataatacaaaccacatgtgtaattttaaatgtgttagtagccacatcaagaaaattttaaaaaggacaaaattaatgtactttattaatctaaaatcttaacatataaatcaatataaaaattattaatctattttacctttttttgtattaaacccttgaaatctaatgtattttactcttacagcatatctcaattcagcccagccatatttcaagtgcttaacagcctcatgtggcctgcgtgcctgctgtactggactgtgcaggtcttttcctagggtgttggtcacctcagactagatgcactgcatataactcttagaagttaagtacatctcatctcttcattaacaagattggtggttactaaagtttgatgaccaacaatcacctggatttttttaatatacagactcacagaacccaccaagattcactaaatcaaaatcttgagagggaaacgggggatttatttttagatactttccaggctgatgatccaggtccagaaactaccaaataatactataaattcttttaactttgtcttaagcctcaagcacatgatagcagaaagcaagcagattttggaaacattgacagttctcaaaacctggctttgtggttgtgcagtgttcagaaaagcatttaaatgtttctcactgctgaaagggactatactcgcctgttagtgatttacataccacagttagaacaggtccaatgcaaagtggtacccaataaacagaagctattttactaatgacttccatgtagtccattgaattcaacccacgacctcttacccaatacaatatctacctaagaaacaagataatataagtcttctcttcctgcttcaactattcagatctttataaactgttatattatctgggagatctttccaccctgcagagactaacccaacaacttacctcctgttttccattaacccaactgctggttttttagtggaaaaaaaaagcttctggttgacaaaactactctacagaatgcttcaaatctataaacttaaaaagctggtttgtgacagaccaggcagctgactcaggcccgaatttaatgcgatcaatgcaacttttgtcttattaaataggggagattaaaaattttaaatatggtttacaaaggaaattcatctatacttacaccacctacccacagttacagtaaaatatacaatacagttagaaagactgagctgaaaaaaatctttctaaatcacccttcattcaaaatcatcaagggctcacaattacctagaagagatagtcatataattttaagactgcaaggaaatgcagagattattttttccaggccttcgccaacttaatctctctttccaagttcaactcctatgtatggtcacataacatctttcacatgaaatatttctctcacttttccctcctcctcttttcttatcttggtgcactctacagcctgcttcccttcaccacttccacccaacacctatccaaatcctcctcccattcagcctgaagacagctcctgggagcttttcctaactactaccctcttctgaactgtagacccactatgcatgcttttcatgtggctctaaataataatatatcacctcattctatcatatacctttccatatgaatatcaccatacaatcacaaagaactccagtctccaacgtatgtatatatacacacaattttgtgtttgatcctttttgttttttgagacagggtctcattctcatcgcccaggctggagtgcagtggtttgatcatagatccgtgcaaccttcaacttccaggctcaagcgatcctcccactttagcccctcgaggacctgcgactaaaggcacatgccaccatgctcagccaacattctttttaatagatggataaacatgtcctaggttaaaaggactactatggctagtcacccacatgttttgatttccaacctagttctctttctacatatttcaagacagatataaatacttaaactctctggttctcaaagggcatgtgaagcaccccagcaatgcacaggaatactgtggaacactttacatttttgaggaagacacatcaacccatcgttgaatctgccagacactgggtgcactgccagcttgaggtggttcgtagtttcaacattagattgtgttacactcctcgtgatggattgtgttatactcctcgcgatggcatatttttgtgaagctgggtttgcagtagttgctgtggtaaaaagcaagtactgcacaaaaatcaatgacaggaaatgagggtggtggtgtccaaccaatgacaacatttgaaaagctatgcagcaacaggtctacataacccaacagtaacaaattatagttatataagaacaaatttaacttttttcttttaatttatgtgaataactttttaaatggctaccaagttgctaagatataaatacttagcgggcaggcgcagtggctcacgcctgtaatcccagcactttgggaggccgaggcgggcggatcacctgaggtcaggagtttgagaccagcctgaccaatatggtgaaaccccgtctctattaaaattacaaaaattagccgggcattgctggcgtgcatctgtagtcccagctacttgggaggctaaggcaggagaatcgcttgaacccaggaggcggaggttgcagtgagccgagatcgcgccactgcactccagcctgggcgacagagcgagactccttctcaaaacaaaaacaaaaacaataaaaaaaacaaaacttacttagctatttggaccttgctacttaatacagagaactatgaggtatttcttgacttaggagtaccgtgaaaaattaaagacagtataagtgttataaattgagaaagtttggaaacttctacttttcagtgtcaaatatgaaaaagttcctgtggtaaggaactatatgctaagttcccaatatatgacagtgcacagcatagttataactaaattaaaagttgtatattggtctcccagaggccaaatctggcctgtgcattgtttttttaaaatcttgagccaacacttaaaagtcaggaaaattcatatacaaatataaatttctggcttttatttgcaaaacagagtatcaagcaacaatggacttgcattactgcagggcaatcatcagcttcagctgagaagcagctaactccttttgaagaggcatgtgtttcccagtttgtttcagtccctaccactcacatcacctaagcaagggcaattacacccgactagctgcactaatatcatctgtctgtccccctcgagtcctgtgactcctcatctttacaaagtagaggcaatgatttatttattgaaaacaaaagcctcattatataatgaaaagtaaaggaaataagtattaggcaataactgggagagaagagactgtacctttgctcccttactctgccacaacctagctatatgagtcaactcaaatcacttctcttgcttcagtttcccgatctgtcaaataagcagaacttgttctattgagttcataggatacaataaaattttatttatttgctttggcaccaaaaaccttttaaatgctgttttaaaaaagtcttcaaaactacttttaaaaatctatattccaaatacctctgaaattatctcttgtactcaccttgagaattttaacaacaactttttcattatttgtgatgttgatggcttcaaatacttcactgtatttacctcggcctaattttcgaaccagctggtagtcatcttgatttctgtggacacaaacaaaatgacttataaacggtcaaattatcagcatcaattcaaattacaggaatctattaccagcagctgtaatagaaataagaagtatttcaaacaattcccaaataggtttttttttttttttttttttttttggagatggagtctcactctgtcgcccaggctagagtgcagtggcgcgatctctgctgactgccagctccacctcccgggttcacaccattctcctgcctcagcctcccgagcagctgggaccacaggcgcctgccaccatgcccggctaattttttgaatttttagtagagacggcgggtcctcaccgtgttaaccaggatggtctcgatctcctgacctcgtgattcgtccgcctcggcctcccaaagtgctgggattacaggcgtgagccaccgcgcctggcccattgtattttttttttttttaaattaggccaattaaaatacgtgtgtttcaaatcctagaattagaaaaacttatacctttcaattattctttctaatcccaaactgtttacatctttattggcacatgacatggagctggcttgtattaaggtttgttctaaatacgtttgtctccaacaagagacagctttccccaagagaataatttttttttttttttttttttttgagacggagtcttgctctgtcgcccaggctggagtgcagtggcgtgatctcggctcgctgcaagccccgcctcccaggttcacgccattctcctgcctcagcctcccctagtagctgggactacaggcgcccaccaccacgcccggctaatttttttgtatttttagtaaagacggggtttcaccgtgttagccaggatggtctcgatctcctgaccttgtgatccgcccgccttggcctcccaaagtgctgggattacaggcgtgagccaccgcacccggccggagaataatttttatatattcttgtcccttagtgcttggtccagtgttggcacttagcaggaactaaaaacattttgcaagactgtttcaatctagccacactttggcagcagctgatttttaacaggcctctttgaaggtaaatggctttcaaatgtataggcttaatctatttgccctccagggcaagctctggggatagtccatgcgtagtacgaagcacattatagattgtaaactataatcagcgatcccctcctctacatatacccatattctgtgaccaataagcaacatcagaggtaataaacagaggtagaataagggaaatgccaacattttcctcctgcccctgcctgcttccaatgtagagcgctttgctctgaagaatgacaaacacagttccaataaggcctaaattctatcctactggatagaatcctctggacctactaagtatccaatatgaaccaaatcaaccacctcaaccattcattttcctcaagtagctaaaaagaaagtgaatgaaaagacaaaaggtactaaaaacaatggacaacataataatcatggcaggtgtaggggaagaatgctcctacttctggttgagttctcttcctatgggagggcatacaaaacaaatgccagcaagcaaacagaaccatgccaaaagcccaaaagggctctttagtgccatttaagcagaaccaagtgcaaagcactcaatttgaagatagcggctgaaattcctatagtaaacacagtgtcacctagagtccaaagcctgtgacataagaggagaattgttagattatcagtaataacaacatttattggtactaaaccacactggcatttaatggtgtctttacagcatacagtgcctctgtattcagaggcaatgtatttactgttaagaatcatggcatactcaaattagctgggtagggtggaaggtgcctgtaatcccagctactcgagaggctgaggtgggagaatcacgtgaacccaggaggcggaggctgcagtgagccgagatcacaccactgcactgcagccagggcaacagagcaagactcatttccacacacacacatacacaaattcatggcatactcaagattaaaaatacgccctatgacaatttagggaagccatccactaaccacttacaggttacagaaatcacatgcagtcagatataaaatacagcatacaggagctgtagctttagttttcaaattgctttcttttgcacttgaatgtcaaaatgcttttatcacaaaagtatgatctgaacaattaaatgtctaccacattgggacaggaaatgcaaacatccaaatgagtctgcacagagaattaggagggcaaacacagctgttcaggcagactacaactgttcaagatagaatttgggctgaattccatgctaagacatgcctagtctcaggataagggcaaatgtttaagaatttaattgtttctcatcagaaagaagttacctctttggagaactgtttcgtcctcctgtattaacacgaaacaacattctctacctcaaaaatactttatataagactttggtgttttcaaagtctctcaagtatcacttctcactgatctgcaatgcccttggcttgataagcaagctgataggtaactttttgttgccaggtgcccatacagaataccgtcatgcgttatttaatgacattctgagaaatgtgttaaacatcagagtgtttacacaaacctacatggtatggcatattacatacctagggtatggcctacggctcctaggatacaaatgtgtaccgtaataaatactttaggcaattgtaacacaatggtatttgtgtatctaaacgtagaaaaggtaatgaatgcactgttgatgttacgatgacatcactaggccacagacatttttcagctctcttataatcttatggaaccactgtcctacatgtggtctgtcattaattcaaactttgttatgtggtgcacgactgcatatacatcatagaaaaggataagaaactaaaatgatttttaaatggtaagcccattaaaattgttcacttgccaaagcaactctgcttcctcactgcaaaaccaaattttcagctcaaaagaaaacacaaattgggctttgatcctgaggtatacacatacagagtcacggaggttttctgacaaaaactactcaacagatccacaagattcagccctttgagtgagtataatgaagtcaacaaaaacaattacccccattccaccacatgtgactcgtaatcccagtattctcgaggtctgtgtgtattaacatctgtgtaaactctggccctgcttggcacgggtcccgacatgtcagacaggttggcggacaaagctggacttgatgtttggagatctggcagtcactgtgttcagaagcagctgggggtaagaccttgtttcagacctgttttcttcaaactgcagaaacaaaatgcacaaagtccaaggaatcatttacagaaggtatatgggaaggaaataatcttacaaataataatggcctgaaatatacctctggctctcctacctacagccaataaatatagctcaactgtgttaaccagtgcttcctataacatgagaagaaaaatcccaagaaatacagtaaactgatatttgctttaatcatattttgccaaatatcctgttacctctgcaggcaaaatttgaatgatttttgtaagacagcctggaagagaaaaatggcattgaggatagatacatcagcattaccactagttatatattctacaaaaggtattggcaagaaaaatactttcttttcagcagctttctgtaacttaagtaggggtgctaaaaggttctagaatggcggcaaagctaagagtacaacttgccattctgactcatatttgatgaaaccaggaagagaataaaggcttgttctcatacatcaaagctccatgtcatcttataccaatccaaatcttttgggggaaccttaaggtaataatcagtagaaccttgatcaccatttgaaagacacacttggtttcattaaatttaaaaacagaaatcagtaatattctctttatatttaatacaggagcttaaaaactggtataaaacagtaatacagattagctgagctaatgcaaaatttgacaccgggggaaaataagtaagatgttagaaatatgctatcaaatcaggttcctttccaatgatgtcttccctatctcctacagcatgtgctgattcccctcattatgcatttagatgaaattgtattgagtctccagattgtgataacgtgagaaggatataacacgtatgcaagtctcctggctgagacagcataacttcaatttgtatgtgtgtatgtgttttaagacagggtcttattccactgcccagactggaatgcagtggtgtgatcatggctcactgaagcctcaacttcctggactccggtgattctttcacctcagcctcccaggtagctgagactacaggcacgcaccaccaccctcagctaattttctgtattttcagtagagacggtgtttcaccatgttgcccaggctggtcttgaactcccaggctcaagcaatcctcccacctcagcctcccaaagtgctgagatcacagatgtgagccaccgcacccagccataacttcaattcaattaccaggaaacattcagaaaaagaggaagtgtctatttaaaaagggggaaggggtactatacttctaaaacatgtccacagcataaaagacaaatggaggctaaagagacattgcataaatgcaatactctagactgtatcccatactgcaggaggtggagggggatgctataaaaaacaatatcgacagaactggaattcagagggtattaaattattgtatcaatgtaaatttgtgaagttggtacataatcacaatagttaagagaatatacctattcttttttttttttttttgagatggagtttcgctcttgttgctcaggctggagtgcaatggcgtgatcttggctcaccacaacctctgccgcctcccaggttcatgtgattctcctgcctcagcctcccgagtagctgggattacaggcatgcgccaccatgcctggctaattttgtatttttagtagagatagggtttctctatgttggtcaggctggtctcaaactcccgacctcaggtgatccgccctcctcggcctcccaaagtgctaggattacaggcgtgagccacctcgcccagcccaagaatatgtctattgttaagaaattttcctgaagtaattagaagtaaacagccatgatgcatataatctaccctaaaatgattcaggaaaaaaatgtgcccacacgtttacatgtgtatatatatagcacacatgactgcacactcacaaatgataaaacaagctgggtaaaatattacaataggtaaacgtgcgtaaagggaatagagatgccctttgtactatttttatttactttttgttgaaatcttcttatttgaaacaaggtctccctctgtaggccaggctagagtacagtggtctgatcacagctcactgcagccttgacctcccaggctcaatcaatcctcccacctctgcctcccaagtagttgggaccacaggcgtgggctaccacagctggctaattaaataaattttttttttgtaaagatggggtttccctatgttgcccaggctggtctcaaactcctgggttcaagtgatgctcccaccacagcctcccaaagtactgtgattataggagtgatccaccatacccagcttgttgaaacacttttttaaattgtggtaaaatatacataacataaactttatggccaggcacagtggctcactttgggaggcttaagagggtggatcgcttgaacccaggagttcgcaaccagtctgggcaacatggtaaaaccccatctctactgaaaatacaaaaaattagccaggtgtgatggtgtctgcctgcagtcccagctacttgggaggctgaggcaggagaatcaccagagaccaggaagtcgaggctacagtgagctgtgattgcaccactgcactccagcctgggtgacaggagagagacctcatctaaaaaaaataaaaactgccattttatccacatttaaacctaaagctcagttgcattaagtatattcacattcttgtgcagtaatcaccagatcatccatttctacaaatttttaccatcccaaatgaaaactatgtatccactaaacactaattttccctcccccaactctttgcaaccactattctattttctgcctgagctggctattctaggaacctcatataagtggaatcagacaatatttgtcctttgttttgtttatttaatttagcataatgtcttcaaggctgatccatgttgtagcatgtgttagaattccaatccttttaaaggctgaatgatattgcactgtgtatatatatacacacacacacacacacacacacacaccacattttgcttatccatttatctgctgatggacacttgagttgcttccacagcttggctattgtaaataatgctgctatgaacataggtgtacaaacatctgtttgagacctcgctttcaaatcttttatgtatatatccagaagtggaactgctgaaccatgtagtaattctatgttaattttttgaagaaccagcatattgtttcaacaagctgggcacggtggctcactcctatacagcaactgtatcattttacactcccaggaacagtgcaaaggctacaacttctctacatccttactaacacttgttattttctgttttttgcttgtttttatagagacaggggtcttgcttatgcccaggctggtcttgagctcctggcctcaagggatcctcccacctcggcctcccaaagtgctctcaaaatagactgtgcctggcctattttttggttttcttttcttcttcttcttttttttttttcagtaacagccctcctaatgagtatgaagttgtatctcattgactgtgattttaatttgcatttccctaatgattaatgatgttgagcatctttttacatgcttattggccatttgtatatttgttttggagaatgtctattcaaagctgttgtccattttttgattgggttgttttgtttgttgacgatgcatttgttaactatactgtttttttgttgcttacaagctgctcatctttccaaggtaagctgtaacttagctaccacacccaaagagaagccagaagagatacctccttatgcccatggtgtcggcagctaaaggctttcagaagaatagcaagactgggatggagattaattctctattccttaaccgtgacaaacacaattaatgacattccactccaaatatatgagatcaaaagattcacatgctgacttatgaattctcccacccaaaaaactgctgtaacttgcctctgttcaactcaaaccttctgaggttccataaatgtactaaatgaccagaaaacaacaaagtaattcaagtaccaaaagtctttaaaattatttctatttctttgattttgtaaaacctgggtgacattaatctatcttcacttaatatcagttaaaactgtaaacgcacacacacacaaacacatcaaacatgcaaaaaccagatgttttcttgtaatttttcttcttcccaaagaaataaggtcatctatgttgtaggattggtgactctgtgactactatgcctgccttgacagcaatgaaagacactaggaaaaccgtagagaaaggtgtaggtgtgaatatggccaaaatagtagaaacagcagcatgaacccaacagaaatgctgtccccagaaatttattacttttaatatactaaacttttaaattctcagcctctcctctgacaggaaacagtatctttctctacataacctttacagccactttactcttctggttaacattttatacgtgtaagacagccttcgtctgtggatctcaaagcccttttcctatgcttaaaagtgatctctctgttgggcttttcccagctttggttcatcacttataaaacctgtctaactgtgcttgcagactgaagggaagatgaagtgagatgatcttccagaaagggcttagaaacatgaaatgcatgtaaatttgtattaagtaattactatcccctagctccttagtgaaagctaataagcagaaacctatctttacaggctggaaccttcattctttaaaatacaaaaattatagtagccgtggttaattcccggccactgagggctaactcccaagtatacatgacattacaaaatgagtcctcatttctccctggaaaccatctgacatatggagaatagccaactcctattactagtcatgtacattctcatcacccagtcttcttctgctgtttcaaggccctggcatcctctgtgaggagtgggaaaagactaataactaatgaaactcttgagattctccagtacttgtctgaatgacccttgaagctttggggctcatcaactgggacctaatttatgaactagcagatctgattctccactgggaagacaacaagctaactatttttgcagtacccccaaagaggtgcttcaccttactgtcacgcataccaaataatctgcttatagtaagaaaggtattcacatgaatttcaaatggctggccttcattaattatacgggaaaataaaacagaggattcttcaactgtgactctgtaatctcagatagataaaagggtactaagagattgggggttaagggatggtgataaaaaggggatgtgaagcccagtgtggtggctcatacctataatcccagcactctggcaggatcacttgagcccaggagtttgagaccaccctgggcaacacagcgagacctcctctctacaaataacataaaaatgagctgggtgtagtggagtacaactgtggtcccaggtacttggtaggctgagatggaaggatcacttgagcctgggaggtcaaggttgcagtgagccatgatctcaccactgcactccaacctgggtgacagagcaagaccctgtctcaaaaacaaacaaacaaacaaacaaaaaacaaaaacaagaggggatgtgaaaagacagaaaagggaggtcaaagaccaaatattatcattattatttttttgagacaggagacagggtcttgcgctgtcacccaggctggagtgcagtggtgcaatctcgctcggctcactgaaacctccacctcatctcctgggcttgagcaatcctcccacctcagcctcctgagtagttgggactatagctatgcgccatcaggcccagctaatatttgtattttttgtagagacaaggttttgtcatgatgcccaggctggtctcaaactcctggactcaagtgatccaccagcctcagcctcccgaagtgctgagattacaggtgtgagccaccatgcccaaccaagataaacattatcttatttagaaatagtatttcacttatacctctgcaaatgcatatgtatatcacatgtaagctaacaggaagaaaacacacagcctacatttctcaatttttggtttgattcttccctacattcctgattttgtccatcccttaaatagataaccatctactatgaaaaagtactatcctaggccttaggaatataagtgagcaaggcagaacaggggtgagacaagtatgccattgaagattttacctatggactaagggtaacagaaattcattgaaaagttttaagcagaaaagtgacccatacatattgtttttaaaatttttactctggctgagtgtgggacaggacttagggagaaggctgttaacagtagcacacgtgagagaaatgatgacctaaggtggtggcatgtggagatcagtggactaatatgaggaacaaaatttatggtgtaaaatcaatagctctgagtgaactggaaaatgctgtatgaagtgggaggtgactcttggatttcttgcttgacagactgttggtgccattcatggagataagagtgcacaagataggttttggacttaaggttaaaatggctttgaatcattcaaacgaagattctgaataggcagttagatattacaagtctggaactaagagtttctcagctttaagtatctaactcttccaacaactctacgaggcaagcattagtttctctaatctacaaataagaacagcctaagttcagtagcttgaccaagaatatccaatacagttacagctgggattcaaagacagtgagttggcctccaaggttcaagtcttctcactcctacagaacacaatcactttctactgcacattcacacacacacacaccagtcttcaaatcttaatttctcaattggaccctaagttctacaaagttaagaaccatgtttaatttacctttttaatttatagtacctagcctaaggcttgcattttgtagcacgttcagtaaacactatttggtgatcaaattaatcttggtttattttttaaaaatgaaatgaaaatgaagttgcatccaaagtatagggtgttcctaaatacttcaggtcatctggtacgcaactaggagaactggaaaaccaagtcaaaggttcttgagtaattgttcccttccctctctctctttcccaatactacagcttctattaaatcacaggactacaactaggatttgtctttttcccctcgataattcaaattaagagaatactgaagaaacttgattttaccaatttttatagcagcttatttggaagatggaaaaagtgcctgagtcctagatatttggaagatcaattctcctctccactgttcataatactagtatatcttaaggcaatctaacaaaatgcactgcctttcttattaagttccattttaaattgtcttacttagtgcttactgttctcatgtaattgcataaaaggaggtgtaactttagtggctaaccatttcagaccactacatctaccttaacaccgtcagaatgactttgaagacatggctaggtcttgtatgctcaacgtttagcctaacagaagccaattaatcagctacgaaaaaagtatcatgtcaatgaatttttcccgactgaagtaagatcacatcgaagccaactgcatgggtctgcatgacctattctttaataaagtataagtaaataaaaagaaaatgccattaaaccataaggaaaaattgtccattgccaaaatcataagtttactgatatacactgaatacagcagaattaatttcaataaaaactcctcttgcccttagctagtccctccttctaatctcttatgttcagttgttatttttcaatttggcaactaaaaagaaaactagaggcttagtaacagtccaataccagaaaactatacaaacaagtttgcttagtcatttctgctaatgtatttttattgatgaatttcctagtatcagaaatggaaaagatcattctagaactttaagtcaatttttgaactgtaatataattagttctttttaaccctaatgtttattagtctccatcttaaaaggaaaaaaaaaatctccttctcatccctaaatgaaccatagcaaatgaacaagatctcatcatcatcccgacaggacaaagatttctatagcaaagaatgaggaatgtgcttagattgcactgactgcatggtttaggactgcttgtttagaggaaaagcagctatacaggaagacaccttttatgcactgctgcagagaatgaactctttttccaagcaatcaggcaacataaactggtaagagacaaacaagacttgtggaactcagcgagaccttaaatatgtatacttttctaccttgctacagaagcaaagagaaaaattcagtcaaacttgcccatttccctttacaaaaggggcactgattagaaggccaacttaatacaaaaaagcacaagtagctaatgttacctgaattacttatttcaaatgtccatacttaaccttaatttctttcttcctttccaatcaagagcagaatgctcatacatcaagcatttactgaacgtttactatgtaccaggaaatgtgtgcctgactgccagaaaggcattctttctcttggtcctggagaaagtatctctgccctcagacaaagaaaacagaccattacaatctcaagtgatcagtgcttgaaacaattaagtcatggtggtgtacagacgttgaagggtatttaaactatcaccaacccatcattcattcaacaaatatttatggagtacctaaaatggggaaaaactgtaagagaaaaaaaaaactgcacttaaagtacgcacaggaattattcagatggaaaacattaaaacaagaaattgcaaagcgtaacactttaaagcaagttaagaattttaaagacctataattttgcaccctaaaatgaccaaaggctggcacattttgttatcttctataagaaacacatcattggatgccacatgcaacgtggcatcaggtgtaaaaaagcacctgatgtgctttttttgcacatcaggtcagcaacctttttatatctgatttggagactattagtttactcgactgttaccattttgtgcttaaaacaaacagtatcattaattcacaagctttggaattctttctctttattttcttttctctacttccaacactaatcagttccttgttgcccaagctggagtgcagtggcacaatcgtagctcactgccacttcaaattcctgggctcaagtaatcctcccacctcagcctcccaagtaactgaggctacaggcatgtgtcaccacacctggcccactcatctttaaataagacagagaagtaattatagccaaaagggaatagaaaatgcaaacccagagatataagcaagcaaggaagcctggaaagcctttgttgatcctgaaaattagaattttgttctcacataaaccaaagcccagggctctcacaagacaaaaagtctaataggaggccctcttcataaggtgggacttcagaggcatacttcctaatggtgagagtgactagggagtggaagatccagggaggaattaaagccctactgaagggaatatcatatcttaagcttgttttaaggtggtctctggattagtgcccatgcatacctgatataagcaagctctccatggaggaaagtaccttactgtgggcctcaaatgatcactacaaatatctatttttatttttattattttttatttttttgagacagagtctcgctctgtcacccaggctggagtacagtggcctgatctcagctcactgcaagctctgcttcctgggttcacgccattctcctgcctcagcctcccgagtagctgggactacaggagtccgccaccacgcccggctaattttttttttttttttttttttaagtaaagacggggtttcaccgtgttagccaggacggtctcgatctcctgacctcgtgatccacccgccttggcctcccaaagtgctgggattacaggtgtgagccaccgcacccagccaattatttatttttaaatacaatgtcctagcagatctcaaaaaacaagaggaaaaatatagtgaaatcgttggatatacttttttttttttttttttttgccacaaagtcttgttctgccacccaggttagagtgcagtggcacgatctcagttcattgcaacctctgcctcccaggttcaagtgattctcctgcctcagcctccagagtagctgggactacaggtgcatgccaccatgcccggctaatttttgtatttttagtagtgagggggttttgccatgttttggccaggctggtcttgaacttctgacctcaagtgacccgcccatcttggcctcccaaagtgctgtgattataggcgtaagccaccgtgcccagccagtttgatatacttttaattggtactagcagaaaagagaatgggataaaggcagtaactgaagacagttgaaaatatcccagaagcaatcagacacaatcaaattccagaagcaaacaatttccaaacaagatcaataaaaagaaatccaaaaccaaacatataattacaaaatagcaggaaaaaacaaagatgagttgggtgtaatggcacaggcctatagtcccagctatttgggaggctgatacaggaagattgcttgtgcccaggagttggaggccagcctgggcaaaacagcaagaccttgtctcaaacaaaaacaaaaaactaaagacaagcaagtacagaaaaaggcagattatattcaaagagcaacattagaacagctgatttttcaaaaccaacaatgaagccaagtagtttaatacctgcagtgtgctgaaaaaaataaatagccgccaaattaaaattctgttatcaagcaaatgtctctaaagaaaaaagaaaaataatcccattttggaaggtctgagttgaaagaaaaaataaagagcaaaaaagaggaaaatttacagacagctccaaacaaacactgattatacaaaagaataacaataccttgaggagctttaaaacatagaatacataacaataaaaacacagtgtattgaggagatttcaaagtattctttctaaaggtcttttattatatgaaaagaagataaaattataatatcaggttttgctaagttatagctgcaagtcacaagatgtatgacaactaattacagaataaaaatagcatatatttccaaaccagaaagagggaaaagtaaaatcataaaaagaatccaaaagaatgttaagaagggagaagaaaaaaatctagaacataagaagcataggggaagaaagttgaattggaatatgattaattatattaaatataagtggaataaattatccaggtaaaagacaaagactatcatatcagactggattaaaaaagaaatccaaatgaaccagaataatccaaacaattctgaaaaataataaagctggaagaattatactaactgatcttaaacttattacaaagctatagttgtcaaaacagtgtattggcaaaaggataatacatagatcaagggaacagaataaagagtacagaaatacactcacacaaacaaggccaattaatttttgacaaaggtacaaaggcagttcaatggagaaaggacatatatacatatatatataaatatattatgtatttttttcgagatagggtctgcctctggtgcccacgctggagtgcaggggcatgatctcaactcactgcaacctccgcctcctgggttcaagtgattctcctgcctcagcctccaaagtagctaggaccacaggagtgtgtcactatgccctgctaatttttgtatttttagtagagacagggtttcaccatattgcctaggctggtctcaaatttctgagctcaactgatccacctgccttggcctcccaaagtgctgggattacaggcataataatcttttctataaattgttttggaagacttggagatcaatatgcaaaatcataaactttaatctaaatctcacactttatataaagataattcataatgaatcacagatatcaatgtaaaacttgggtcagatgcggtggctcatgactgtataatcccaggctgggtgacaaggcaagactctacctctgggggggaaaaaaaaagatataaatgtaaaattatcaaaccttcttgcaaccaggggttaggcagagtttgaagacatgacactaaaagcatgggctgtaaaactgataaactgaacttcatcaacgttaaaatatttctgctctgtgaaagacactattaagaaaataagccagacacaagaagaatgtatttgcaaatcacaaatcgaataaagaacttgtatctgtaacattaaaaaactcaataagaaaacagctcaatttaaaaatgggcaaaagacgtgaacatacacaccacaaaagaagatatacacataagtatatgaaaagatacacaacactgccagacagcagggaaaatgaaattaaatcatacaactaccactacagatttattaaaatggctaaaatttaaaaaaacagaaaacaaaactataccaaaagctggtgtggatgcagagtaacagtaactaatacattcctggtaggaatgcaaaatggttttggaaaacagtttggcagtttcttatagagttaaacatgtacttaagcatacaaccagcattcccactcctaggtatttactcaagagaaacggaaacccgtatctacacaaaaacttatacacaaacatttaaggcagctttattcataattgtgaaaaaacagaaacaaccaaggtgtccaacagttacatgaacaaacaaatggtttgccatgtgatgcttagcaataaaaaggaacaaattactgatttgtgcaacaaaatggatgaatcgtttttctttttttggtagagacagggtctcgctttgttgcccaggctggtctcaaacgtctagcctcaagtaatcctttggcttcagtctcccaaagtgctaggattacaggtgtgagctgctacacctgaccaacatggtgaatcttaaaagtgaagaagccagaaacaaaagcctacatattgtatacttccatttatatcaggggtccccaatccccgggccatgggcctgtaccagttcatggcctgttaggaaccaggctacacagcaggaggtgagcagcgggagtcactcgcattactgcccgagctctgcctcctgtcccatcagcaacagcattagattctcataggagaaccctattgtgaactgcacatgtgaggaatctaggaggtggagctcaatttttctcctttaaggaaaggaaataagtaagcatggaaagagagcctaaatttctccctttccatgcttattcattacaagggtattcctaagtccaatgggcttggaaagggagaaatagcaactctacagtagaaaaacctggcagactttactgaaatatcactagtgttaagtcactttgacatcatatgcccctgatataatgtgatgagaagggcacttcacctctgtggtagtcttctcaaaaatccataaccacaatttaatcttgagaaaacatcaaacctgtattgaaggacattctataacatacatcaccagtcttcttcaaaagtttccaagtaatgaaaattaaagacagactaagaagcttcacagactggaggatactaaggagacatgatgactaaattaatgtggtatcctggactggctccttgaacagaaaaaggatacaactggtaaaatccaaacaaagcctgtagtttagttaatagtattataccgatgttaatttcttaattattttatttatttatttatttttagagatggggtctcactttgtcacccaggctggagtgcaatggtgtgatcctagctctcccagttcacagcagcctcaaactcctgggctcaagcgatcctcctgccccagcctcctaagtagctaggactacaggcacatgccaccatgcccacctaacttctgagaaccaggttggtctcaaacgcctggcctcaagcaatcctccccaccacggcctccagagttactgggataacaggtgtgagccaccatgactggcccagtttcttagtgttgatgacatatcacggttatggcaagatgtgaacattaggatatactgagggaagcatatatggagattctatctgtaacttctgtaaacctaaaattttcaacattacaagttaaatactgccaatatttaacttgaaatgctaaagaggatgagatgctagagaagatgaggaaaaactgaaactcatacattgctagtgtgaacgcaaaatagtactgtatagccattctagaaaacagtttggcaacttctttataaataagttaaatgtacatttttcatatgacccagcaatccaactcacagttatttaccctagaaaaatgaaaacttaggtccacaaaagcctataatgttatgttcacagcaactgtattcataatcaccaaagaatgaaaaccaaaatgtccttcaaggagtgaatggataaaaataactatagtctatccataaatggaatactactcagtaataaaaaggaactaaccatttacacacacaataactttgatgaatctcagaggcagtatgctgaatgaaataagccagtctcaaaatattacataatgtttgatttcatttatatgacattcacgaaaagataaaactgtagtgaggttgggcacggtggctcacgcctgtaatcccagcactttgggaggccgaagcggatggatcacaaggtcaggagatcgagaccatcctggctaacacggtgaaaccccgtctctactaaaaatataaaaaattagccgggagcggtggtgggcgcctgtagtcccaactactcgggaggctgagcttgcagtgagctgagatcacgccaatgcactccagcctgggcgacagagcaagactccatctcaaaaaaaaaaaaaaaaaaaaaaactgtagtaactcagaacagaacagtggttgctagagattaggggtgggaggctaggtatgttaccaagggtaacatgcagaaggtgatataactattctatgtcccagttgtgatggtagttacttgaatctatgtatgtattaaaattcatagaacagtatacacaaaaaggagtcaattttactgtgtattaatttaaaaaaaaatttaaaaaaaggaaaaaaattctatcacatgctgtctaaaagagatacatctaggccgggtgcagctgctcacgcctgtaatcccagcactttgggaggctgaggtgggcagatcacctgaggtcaggagctcaaaaccaccctggccagtacagtgaaacccatctctactaaaaatacaaaaatgagctgggtgtggtggtgcgtgcctgtagtcccagctgctcttagaggctgaggcaggggaatcgcttgaaactctcgagaggcgaaggttgtagcaagataacgccattgcattccagcctgggagacagagggaggctccttctcaaaaaaaaaaaaaaaaaaattaataaacaaataaataaaagagatacatctaggccaggtgtggtggctcacttgaggtcaggagtttgagaccagcctggccaacacagcgaaacctcatctctacttaaaaacaacaacaacaacaaaacacaaaaattagctgggtgtggtggcgggtgcctataatcccagctactcaggaggctgaggctggagaatcgcttgaacctaggaggtggaggttgcagtgggcactccagcatgggtgacggagactccatctcaaaaaaaaaaaaaaaaaaaaaagagatacatctaaaacatggggtatatattatatacacgatgtatacatgcactgaaacatcacaatatatcccataaatatgtacaattatgtatcaattagaaattaagagctgggcacagctcaggggtccctgcactttgggagactgaagaggaaagatggcttgaggctgagttcgtgaccagcctgggcaacacagcaagactaccatctctacagaaaaatttaaaagttagctaagtatggtgcatgcacctgtgtcctagctactcagaaggctgaagtgatcatgtgaacctaggagtttgaggcttcagtgagctatgatcacagtgttgcactccaacctggctgacagacactctgcctcaaaatcaatcaatcaataaattttaaataaaaaaaaacataggctatagagagtttgttcataaaaatacgatatttcaaaacgtgggatacaattaaagcaggacttagaaatttataaacttaggccaggtgtggttgctcatgcctgtaatcccagcactttgggaggctgaggtgagtggattacttgaatctaggagttcgagaccagcctgggcaacatggcgagacctcgcctctataaaaataaaaattttaaaaatcggctgggcgcagtggctcacgcctgtaatcccagcactgtgggaggctgaggcgggcggatcacgaggtcagaagatcgagaccaccctggctaacatggtgaaaccccgtctctactaaaaatacaaaaattagctgggcatggtggcgggcgcctgtaatcccagctactcaggaggctgaggcaagagaatggcgtgaacccgggaggcagagcttgcagtgagccgagatcgtgccactgcactccagcctgggcgacagagcgagactccatctcaaaaaaaaaaaaaaaaagaaaaaaaaaataataataattaggctgtgcacagtggctaatgcctgtaatcccaacactttgggaggctgaggccaaggtgtgaggattgcttgagctcaggagtttggagaccagcctaggcaacatagtgagaccctgtctctatttttttaacttaaaactattaaaaaaaaaaaaaaaaaaaaaaagccaggtgtggtggcatgcacctgtggtccaactattcaggagtctgagatgggaggaacacttgagcctaggaggtggaggctgcagtgagctgtgattatgccactgcactctagcctgggcgacatagcaaggccctgattcgaaaataaaaattcataaacttgaacttagaaaagcaaactaaaaattaagaacttacacatatctcaataaatttgaaaacagaagcccagagaaactagaaggaaaaaaacgggaaaagcagcaatcaaagaaatatgaaacaaagaggatccacaataccaattgagtctttaaaaatgctcgtgctgagcccgtggctcatgcctgtaatcccaacactttgaaaggccaaggcaaaggattgtctgagtccaggagtttgagatcagcctgggcaacagagtgcaacccccaatctctacaaaaataatttaaaaattaggccaggcatggtggctcatgactgtaatcccaatacttaggaaggctgaagcgggaagactgcttgagcccaggagtttgagaccagcctgggcaatacagtgagactccatctcaaaaaaattgtttttaataataaaaacaatggaaaaaattagctgagtcccagctactcaggaggctaaggcaggaagatcacttgagcccaggagtttgaggctgcagtgagctatgatcatgtcactgcactctagccagggcgacagagaaagaccctgcctctgcaggtgggggggaagaaattaaaaatgtaagtgtgcttgatttaagaaaaaaaaaaagaagggccaggtgtgatggctcatacctgtaatcccagcactttgggaggctgaagcaggcggatcacaaggtcaggagctcgagaccagtctggccaatatggtgaaaccccatctctactaaaaatataaaaaattagctgggtgtggtgccacacgcctgtagtcccagcaggaggataaggcaggagaatcgcttgaacccgggaggcggcagaggttgcagtgagctgagatcatgccactgcactccagcctggcgacagtgagactctgtctcaaaaaaagaaagaaagaatgagagagagagagagaaagagagagagacagacagagagagagagagagagagagagagagagagagagagagagaatgaatattagggtaaatgtccaatatcaagaatggaaatgagggagtgagggatgaattagggtaaatgtccagtatcaagaatggaaatgatacatcactacagatcctacagatggtaaaaagataagacaatatcacgaacaactttgtgcccacaaacttgaaattcccagaagaaaaataatttatcaaaactgatacaagatcccagtctgattctcagggagaaaaaacaaaaactgacacaaaaaatgaaaaccataaatagtcccataaccaataaattcaatcagtattgtttcaacctgttctattctaatgtctttgaactgcacagattaacattttcaaaacatttgtttaaactgactgaacttgcttcccactcctctccaggtctctgtgcttttatacattgattatgccttccaatagtgcttgctaggggaaatcctactcacccttcaagaatcagcaaactttacatccactatgaagcacactatgaagcattcccatctttctccaaaacaggccaagtacctcttctacagggccaaagcaaccccatatactctctgacattgtcacactgaatgtgttttgtttacatacacctctctcctcagattatgaattcaagtacttggactttgatttatttctcttggtggatgccccgtgtttcaccacactgcccaggctggtctcaaactcctgacctcaggtgatccaactgtttcagcctcccaaagtgctagggttacaggcatgagccactgtgcccggcctgtggtttttaaaatgctcctcagtcttacctataaatgttattgcatccatcctttttaaaccaggggaaaaaggtttcctactatcacttaccaaagagatgtgaaactagtcagtatgggtgaatgatgtttcttggagattttatgaggttccacgctgcatgatttaccatgtgatgagcacactgcttgacaagccttgatagagctacaaaaacagttcagtactccgttactgaaaggatcttggatttaaaagacatcataaggttgcagaaagaataagtacactagaaccactacaacctacatctgatgttggatatgttatttaacctacctgattaaagtgagaaaactgcagaatataaggattatcacccttcccccactcccttctttactgccatggtggcaggttacatagcagacaaccatcatctccgcaggtgatcaataaccaacagctaataaggtaggttgtcctaaaactgacaaaaatagaataggctggaagtaagggcagtaaaaactggttgcctttcaattctgaagatattatgtgaatgcctatgtcagtcactgattcttgggatttatcatttttgtgtgtgtaacagggtcttgctctgtcacccagggtgggtgactgcagccttgacctcccaggctcaagcaatcctcctccttcagcttccttagtagctgggaccataggcatacactactgtcccctgctaattaaattttttcttttttttctttctttcttttgtttttttttctgagatgtcttttgtttttgttctgaggtcttgttatgttacccaggctggtctggaagtcctaagctcaagcaatcctcctaccttggcctcccaacgtgctgggattataggcatgagccaccatgcccagccagatttatcactgttaaaccagcaagtccatgacctaagtaatgtctttctcattttacagaaggcaaaactgcataaccttcccaatgtcagaggtagtgattggaaaacattcgtctagattcacagcctattcttctgttctacagcaagggactgtaaactggtgaccacaaacacagccaacccccatacccatggtttcagttacccgcagtcaactgcagtctgaaaatattaaatggaaaattccagaaataaataagtcataagttttattttccatgtttgtttttagagacgaggattcactcagtcacccaggctggagtgcagtggtgcaaccgtagctcactgtagcagcctctacctcccatctcagcctcccttgtagctgggaccacgggcatgcaccaccactcctggctattttttttttttttttgtaaagaaggtttctcactatgttgcccgggctagtcttgaactcctgggctcaagcaatcctcccgccttaccctcccaaagtgctgggattacaggcatgagccattgcacccagccatgttttaaattgtacatggttctgagtaatgtgatgaaatcttgcaccatctagtaccatccagccctggatgtgaatcatccctttgtccagctgtatatgccacctgctcattagtcacttggtagccttcttggttacttgaatgttgcagtattgcagtgcttgtcttcaagttacccttattttacttaagaaatgccccaaagtgcaagagtagcgatgctgagaatctggaaatgccaatgtgaagctgtaaagtgcttcctttaagtaaaaaggtaaaagttcttgacttaatatggaaaaaaaaatcatatgtggaaattgctaagatctatggtaagaacaaatcttctatcagtgataatgtgaagagggaaaaataaattcacatttgttttgctgttgtacctcaaactgcaaaagttatgaccgcagtatgtgataaatgcttagttaaaatggaaaaggcattaaatttgtgggtagaagacatcaacagaaaactgtgttccaactgatgataatcaggtttggtattatctgtggtttcaggcatccactggggatcttggaatatatttcccacagatggctgggaacaggactactctgtgtgtatatctcctatttggctcacatattacttttaaaaattgagataaaatccatgtaacataaaactcatcattttagggtacaatcagtaccctaaaatggtgtgttttcgtatattcacaatgctgtggaaccatcaccactatctgattccagaacacttcatcgccccaaaaagaaacccagtacctcagaggattaactcccaatagcctcttcctacaatcctctggcaaccaataatctgctttctgtcttcatgtatttgcctattatggacatttcacataaatggaatcatgcaatatgtggcctcttccacttagcaaaatgtctacaagtttatccacgttgttgcaagtatcagtaattcatttccttttacagctgaattcactgtataaatacatcacattctggttgtccattcactgacagatatttggactgtctccactttttggctactatgaaataatgtcgctaggtgcatatgtgtacaagtttttcactttttttcctttttttttttttttttagagtcaggaccttgctctgtcacccaggctggagtgcaatggcatgatcatagttcacttcactgcagcctcacactcctgagctcaagtgatcctcctacctcagtcttccaagtagctgggactatgggtgtgcgccaccacgcccagttaattttctgcatttttagtagagacagggtttcgccatgttgcccaggctggtctcgaactcctggattcaagcgatcatcccatcttagccttccaaagtgttgggactacagtatgagccacagtgcccagccttcacactgtttttaaaaagtaaatcaggggccaggcatagtggctcacacctgtaaccccaccagtttgggaggctgaggcaggcggattacctgaggtcaggagttcatgacagccttggccaacatgatgaaaccccatttgtactaaaaatacaaaattagccaggtgtggtggtgggcacctgtaatctcagctacttgggagcctgagacaggagaatcacttgaacctgggaggcagaggttacagtgagctgagatcgcgccattgcactccagcctgggtgaaaagagtgaaattccgtctcaaaaaacaaaagaaaaggtattaaggtgaattatgtattaaaatttttcacaattaatatttttcaaagtgacagttaccaaaattaaaaaaaaatttaactttctatttcttaaaagaaataaagcaggagggagggcaggtaggtctgtctgtctggtaacaatgactcttcattcctgcactgacaaaaacctgctggatatgctaagctgtgactgtccaacaactggctcttttaacagacacccaatggagataccacacgtaaacctggacaactcttcatttaccttattgactcgactcctgaaggcatttgagcaatcaatccctggtttatactaaatatataaatttacaaataataagatgggggaactcttatttagactacacaaattttggaactgaaaatgcagctcaacaatgagatcagtggccatgaactctctggtaaatgtatataaagcagcatgtacatgtacatttttttttgaagaaaaaaattattacaggctcaggaaatctgtaaactccagcaaaattaataattcctgagttagacaaacagaaactcatctaagaaggctaacttggtgatttacataaatattaaaaaattaaactgctcaaactaagtatatgccattctttcctgaaggaagacaagaagacaatgtatcctaggcttcagagtatgagacccaagcttgatgaatgattaacaaaatgtcagcctcagaaaagatacagtagcattcagagttagtcaggtagagataacagttttacaaaagggaactttacttctgcctcacattactgcttagaaaataagaacttgaatttcttcactactgtccaaccttaaattgttcacagtcttgtattttaaagcatatcctttgaatcatgtgtccaaagagaattacttgtgggtcagagaggtaccttaaaatggctttaaaaacttaaaaccaagattattttcagattgtttacccccttgaatcttaaaactgttcagatatccaattactgagctttctaaattagtgctcccagtttttctaaacttttaactttttttttttttgagatggagtctcgctctgtcgccaggcctggagtgcagtggcacgctctcggcttactgcaacctccgcctcctgggttcaagcgattcccccgcctcagcctcctgagtatctggactacaggcaagcgccaccatgcccggctaatttttttttttttttttttttgtattttagtagagacagggtttcaccatgttggccaggatggtcttgaactcctgatcttgtgatctgcccgcctcggcctcccaaagtgctgggattacaggtgtgagccactgctcccagtcttttttacagtcaagacagaaaataatatttgtatggcacaatggggtaaatgatcaagactgctctggatctgaggtcattagtttggatgctgtatccaaactatattctgcatgaatggccagaggtgtgaggggaccagtatctcaacacatctgtaacgcaccctaacacaatacactggttgagaaattctagtttaaataacttgtggagatcacgacctgaatagtcaaaatccatgcagcaggttgagaaaactatttcacaattcctcttatttcaagagatacgcaatcaccttttgcagctttcaagtatagaccagatgtactaacaggcaaccatttcgtctggaagatcatctatttggaggtcactgacacaaaaaaacaaaaacaacaaagacaaaacaagcctccttaccctagctcagaaggataagccaaaagaaaacaggttaacggtaaaaatgtatgattaaatgaagttattgttttttttcctccacttcatattgattctcttttcccatgtcaatttaaggtggtaaccatggccaacaacattctctctcacctatcatactaatgccatataagtagtagtgtttttgttttttcaagtggggaaatatatacagctcaaaaaaacaaaaaaatatctagcaactaactccttggcagttcccttgactctctgacctttaagtcccaaggttctaagtatacaatgaataagaaaactacctgttcaaacccaacagaatatgtttttttctggtttgattaaggcttcgaatttggaacataaatactctcagtaatacttagtaattcatgaagttactgcttgtgtaaacttgcagaatatttaactttaggagattataaatcctaacatgcccctaggggccttctgcttttattcctacatacaaaacatacaacatgtttgtttttaaaaacaatgcacataggccaggtgtggtggcacacacctgtagtcccagctacttgggaggctgaggcagaagcatcacttgaacccaggaggcagaggttgcaatgagccgagatcatgtcactgcactccagcctgggtgacagagcgagacgctgtctcaaaataaatacatacatacatacaaaaaaattaaaccaatacacggaagtattacttccataaaacaaaccaggaagtacagtaaaacagaaaacattagcatttgggccttttgtgtgaattacatttctccaccttcaacccagaaaagggatctgagtgtcaatgtgacataaatgacatagcaacagtgtgaggtctcccaatgaagggaggtattagaagaaaatccaagcagtttgatttggattaatagttctaccccaaacacctaagagaaatcggaattccagtactgtctcttacaatatagtcatcatctatacacctttttaccacgccatataagcaaaataaagtcacaatgtgaaactttactccactggctattaccctctggaaccaaaagatggaaaacttcatttgggatatacagtaatctaaagaaaaattcagcacttatgaatgtaataactactgttaccatttgaatgcctcttacaaaccaggcacagtatcagatgcatattctgattttagaaataaacagattcagaggttaaataatctgccaaaaacaacaggattactaagtggtggaagccagatctgtttaggatccaaagcctaaataggttcttttcactaaatttaatactatttccttagttctccaaactgatttattaacagcctatccaaaacactataataaaatgaactgctttaaatttggaggcaaggtaggggtgggatactgagtttcaataatcaggtttcttcattattcttttacctgaatgggctggccaccaggccacaattgtataaaaatcagattttaaatgatggaaaagcttttctgtgtggctactgaagggagaaaggaagacaactgagacatgccccaccttgctggctgggggctggtgacatctgtgggcctcagtgttggactccagatgcaacaaagcctaaagttttgaatatgtatgaaggtcaatgtgatgttttccaaaaacagtcataaaagatggctgtgaaaaaccccctagtataacaactgtatgtaacaagagcatataggtagctgcagatgaatgctcaggtccttagctgtggtgtttaaaaattcttcagaccaggctgggtgcagtggctcacacctgcaatcccagcactttgggaggccgagatgggtggattgcctgagctcaggtgttagagaccagcctgggaaacacagtgaaaccccatctctactaaaatacaaaaaaaaaaaaaagccaggcgtggcagcgtgcgcctgtagtcccagctacttgggaggctgaggcaggagaattgcttgaacccgggaggtggaggttgcagtgagccaaggtcgtgccactgcactccagcctggcaacagagtgagatgctatctcccaaaaaaaaaaaaaaaaaaaaaaaaaaaaaaaatttcttcggaccagtgtggtggctcatgagtgtaatctcagcactttgggaggctgagttaagaggactgcttgagcccaggagtttgagaccagcctgggcaacatggtgagaccttgtctctacaaaaaaaattaacaactacccacaaagaaaaccctagctcaagatggcttcactggaaggaaaaatgaactggtcaggaagacagacaaatagaagcaaataatgaaagcattttatttgacattgataaccttctcacaataaattatgtggcaaaatacatgcttgaatacttaattgctaggcaatagtctattttcattttttcacaaaaggtagacaactccaaagcagatggccatttgtagccattctatataatcataaatacacaaaacactggccgggcgcggtggctcacgcctgtaaccccagcactttgggaggctgaggcgggtggatcacctgaggtcaggagtttgaggccagcgtggccaacatggcgacaccccgcctctactaaaaatacaaaaattagcccggtggggtggcatgcacctgtaatcccagttacttaggaggctgagagaggagaatcacttgaacccaggaggcagagattgcgccactgcactccagcttgggcgacagagcaagactccatctcaaaaaaaaaaaaaaaaaaagttttaaagtgccgataaatacaagttcctggtctgcctacagtttatcacttaataatacaaagcaaacaagaaagcaagttagtggattacctgagagagcaagacatagagaagatgttaatgcagggagctggccttctccaaacatatccctaacacacaatattcaagcaattcccaaactgtgatcagagaaccactgggagtaagacctctgatctatatttacaagtctataggtgagcaaaggtagaccttttcctgagtctgagatgggaatattaccttctctatctagaagcaaaagaatcctagactcaccaggactaggtaatagacactgtacacgagtaattgaggtaatctacactgggcgtgacttacatactgatccacccctaggcagcaattcatacctcacccacccaacaggctacattagaaacaaggaagtacaggtcaaaagtctcattaaaaaaataagaactcttggcagcagaaaatgaaaataaagaatgaagaatgacagcactggcaataaacacattcttttctccgaaagggaagggaaagaactaatgttgggcacccacatgccagacattttatcaattttctcctttaatcctcaataatcctgagataatactagctagtactctagttattaatcctcacaaaaatcctgaggtaggtactactaattcccatgttacaggtgaagaaaccaaaagttagtaagttgcccaaggtagttgttatccgaactgtagagacaagaactcccagacttgaagaggttaagtaaacttccccaaactcaaagtgggagttctttcccactaacctattgccttcccctccctacccgcaatctcaattaattctctattctacccccttctcatttctgcagctgtttcaaaaactacacctaagatacaaagcaaataggagttattataagaaaacacctccaaaatctactaagttgtggtatgatatgcctgttatcagaaaacgtcactcaattttgagcttggagggcagtgacagtttggagatctttagcacaacgcctgccagaaacgtggcaggcgctcaggatctgctgaatgaacaacatcttctgagtggttatgaattcaataacccaaaatgaccatctcgtatttctggatatgacatgataccattttttggaaaataatttacccattcattttaaacagggtagctttcttaaaatttatagaacattgatgagatagctaaactgagaaatgcccattaaagcattagtcataacttcaggaaaatttcaaatgttcacttttccaagcaaattaaaatgtttcagctaataaaaacctgtcagaaaaacccacaagacaagaaagtataaaaagaaaagagcagccaatataagggcatttaagatgtcacacataaaaaattataaaacattaatctaacttgtaccttggtatttaaccctaaaactgtcacctcagataacacaatattttctatgcaagaaaacattatcaccacgaatgtaaagaagcttgccgaccatagcaactgttgctacgtagggttttttaatgtctaagactgaaagacagaatttgtagaaaccagttaaaatgccactcttagcagtatcttgtgatactgtgaatgctttcaccttaaactttttaaaagactcaatctttgacttctacatgtgaaaaaaaaaaagtacatctgggagcactcaacgtaagaaaactaccaattgtctataacccaatgaaaatacatcctttgttacaatgacagcagctacttttccttaataatcctagaggaatttcttcatttgaaaagctggctggcctagatttctctataaactaaatgacatgctactttcgaaattatccatttcagaagttcaaagaaattcaggtataagaacacattaatactctcatgaaacaaaccttatccaggttacccacgaattgtgacagatcaaaacccagtttctcatttcaaatcaagtatcacattatttattaccttaaaatactaagcccttacctaattcaatggcaaatcatattggttttcagtttctgaacttgtacaaatcatactgtaatatttatgcaaaagttgtcatatagttgaatattatagacagttaacatcttttttttttttttttgagacggagtcttgctctgtcccccaggctggagtgcagtggcgtgatcttgactcactgcaaccaacctccgtctcccaggttcaagtgattctcagcctcctgagtagctgggaccacaggcacgcacctccacactcagctaattttagtagagatggggttttaccatgttggccaggctggtcttgtcctgacctcaagtcatctgcccacctcggcctctcaaagaactgggattacaggtgtgagccaccatgcccggccaacagtagaaaagggtactcagggaacatagttcaaaagtcatgattctctattggctggaccaggattctagactagctctagggctgagatatcttagtagaccagttaacattcatgtggcccaatttcccttactctaaacccaaagtcaaacataacctctaaagtctttcataccctgaaatgctaatcttgtaatcatctttctattcaggtaataactcaaaagaaatggtctcacttccttcatcctctgactaaagtttagttagtccatattttatgaatccaattaataggatactttaaagaacaaaaagaaaagacttttcttaaaagctagaaactccattctgtagtgatgattcccagatctgactcttaaactcaacaacctcaacagacaatgacagggagaaaagatcttacaagtttgagctgagctggggtggggtgggaggtgtgagagaacagagagacagttacaaattcacaaaaatgtatcacccatttccatctcctctaaaaaaatatgaaataagccttaaaaggctgtcatagaaacccattattaagccaataaaaactaatgaagaaattatgtcatttatccaagatatggaagaaccacctatttacagaaatcctaccaatgtcctagaccttcagaaactacatctcactaagctgaccatcaagccccttcaaactgcatctaaggacaataataatattcaaacatcaagaaacaggcacaggttccactcaacaccattattccgtggagtcttccaggactaaattgttttatagaatctttgctatctttgttctctagaaaatgatatcccaaagactctaaaataaaaccagcaaaacccctgtatttgttttccattgtgtcataacaaattatcacaaacaaaacaacacaaatggattatcttacagaagtcagtgggcttgactgggtctcacaagggctaaatgagggtatccagtgggtgggttccctgctggaaactctggggaaaatttgcttccacattcattcaagctattggctgaatttagttccttgcagctgtaggactgagttcccacttccttgctggttgtcagctgggactggcctttcctactagaggctgcctgcattccccgtctcacactttcaatctggtcccctccagtaacggcaggctgagtccttctcatgcttcaaatttgacttccccttctgcctcatctctgacaccagccagaaaaagttctctgcttttaagtgcttatgtgagtagaataaacccacccagaaaatccaagataatctacctaagatccttaactttaattaaatctacttaacatattcatgttccagggtttatagtatggaaatcgtaggggagccattctgcttaccgcagtctgccttctggtttccaaggattcatctctctctcaaatgcaaaatacatccatcccatcccaaggtcccaaaggtttcccatctaaagcttatcatttcagaagtcccaaatctcattcatctattcaggtgtggatgaggttctggggacaaaacagtaagtccaattcctggggcacaattcctaaagaaacaagttctctactcccaacataccactgtgagacatgtagagaataacagttagacattccagttcaaatgggcaaaatgtaaaagaaaacagagcctccggtccaaagcagtttcaaaatctagggaatctccattccatttcaaagcctgggaaaaatcctctccagcttttagctccacccctctgggctctcctatctccgtctgagtcaccctgattcttttatgaaaagcaacacattcacatgtgagtagttttatcagcctgcttcctatcagtagaatttggggggtccaacagccctattactttctgtctctttcaatccaaactagaactgtttatgttggcataaaattctcaagaacctaatgggctgtggaagtattccacatgggtccactccattaaagttcacattcacaaataaaccaggctgcacatttaatactttgcttggaaatctcagctaaatatacaagttcatcacttgcaaatttggctttccatataaccataggatacaattctgctaaacttagttgctactatgtaacaaggatcccctttctgccagtttccaataagaaagacctcacttctgtctgggccctcactagcagagtcattaacatccatattgctactaaaagtatgtcctaggccttttcttttttgacagggtctcactctgccacccaggctggagtgcagtggtgccattaccgctcactgcagccttgacttcctgggctcaagcgatcctcctgtgttccaggccttttctatcatgcccctcaaaacaattctaacctttatctactgccactttcatttttaggtaatagtaccccactcctggtaccaaaatctatactagtgttctactgctgccataacaaattaccacaaatgtagtagctaaaaataacacaaatttgttatctcacagttattgtaggtcagaagttgggtgggcttggctagctaggtcttttgcttagggtctcacgaggccaaaaatcaaggtgtctcaaggttgcattccttggtggaaactgggaaattcacttccaagctcaatcaggttgttgaccaaattcaggttccttctggttgcacaactgaggtccccatttctttctggttgtcagccagggactggtctttgccactagaggctgcccacattccttctgataaactttccatgtggtcctctctagcaaaggcaaatggagtccttctcatgcttcaaatctctgatttccttttctgcccatttctctgatcccagttggagaaagttctctgcttttaaggacttaagtgactagattcggcccacccagaaaatccaggataatttttctattttaagattcttaaccttaattacacctgccaagttccttttgccatgtaacacaggatagctacagattctggggatcaaggtatggcaccttgggaagagggagatgtaattctgcctactacaaatccaagtcctatggaagggtttaaactcacttcctaaagaaaatcatccctttctttaacagagtgtgaagtaaagatgtatatattttacttatgtgaagtaaagtatatatacatacatacatatgtctttacttatgtgacacaaagatgtatgttcagagatagagacaatagtaaaaacaaggactcactctggatgagtgagtaggaaaaggacgcgcagtatggaaaaggagttgccacctgtttcatcctcaaattgcaaggcacttcacccataactacttagaaactaacccatgctcctccttaaatgtgtatttctcttctctgtattccacaaaggagtacataactaggcttttttttatttttaaagaaaagtcacctcacggggacctaactgtataatcagttgattaatcaatctaagcaaatttccaatcttgcattctttcttcaagtcatacaccctcccgcaatagcaaaccaaagccaagtatttcaaagtcacagaaggacaaaaacatgccctgctaagactgcaggtgaacttttgagaataccacggaggagaactagtattggtactggactttcagccccaggtccaccaagccagtaaagccaaatgacttacaacaaaaccctacaacaactacaaagatactactctaaagccctgtctacagtcaaattcttgactataaattttacttagaacagaagagccccaaatataccagctagtccctttacagtgacaggtaaaagctacttactacacttactacctgccagacactgtagtaagcacttgacacaaattgtcttatttactcttctccgtaaactcacaagctagaaaataccatcatcccccttttacagacgggaaaactgaggcttagagagtttaggtcacacagctaagtagcaatggccctgatatttgagaacctaggcagtctggtttttaaccactgggcctacactgcactcctcagatggaatgaagtctccaattcttggaaaaatcttcccttcttagttttcttttttctttttgaggcggagtctcgctctgtcgcccaggctggagtgcagtggcggatctcagctcactgccacctccgcctcccaggttcaagcgattctcctgccttagcctcccgagtagctgggattacaggcgcgcgccaccaagcccggctgatatttgcatttttagtacagacggggtttcaccgtgttggtcaggctggtctcgaactcctgacctcgtgatccacccgcctcggcctcccagagtgctgggattacaggcgtgagccacacgcccggcctctcttcttagttttcatttcctctccccatgtcccattctcgtagaattaaacagctgaaaagtaatcaagtcttcccaaataatttgccaccttcttttcaaaactctttcctccacacaaagcaatagccaagatgcaacttctcctgaccctgactctgcttccccaaaacaaactacagaagctccacccatcacctgcttaatctagcaatgttccaacactgcaaaaaacacacaacgaaaaacaaaattgaaaagtcctactctttcaaaaggtcaccaacatatgtatacccttagccaagctttctctccatacctctttttctatccaggctcctaactagtccttaactccaactccagacgttctgccccacgtcttggtcccttccccctttcgccccagcaaccccgcctggggttctctccacctcgcacccactctgcaggtgggaagctcagccccgcccagagggaccctaagaaggcccctactccagctgcccagtttcgcgggagggttcactgcacactacccagcaggcaccactccctccgcaccctcccccagcacccccctgcggccccacccctcaagttcccttccccctctgacgaccccctcctccaagttgtcccctagtccccacccagttcagtcctctcctctgcaataagctggactccggcagccggttcccaccctcacatcggcctctgcccccaaacctcgccctccgccctgaggggtggcccctgggcctccccgatgggctgcaggggcctcgcttggtttatgtgtgaaggtgggggcaggggaaggcgacgggccgctcaggagtctgctggaagcgtgagggtcggccgcgctccgctgccctatcctgggcccaccccacccgccaacgacctcgcctggctgctccctaggtacctgtggtggaagcggcagcggcggcggccgctctcccctctgctcacacagacaatatggcggcgatggaggaggagacacacggctcggccgccagccgcagggaccagagcgaggctgcagccgctgctgccggaagcggaaaccccctcctaccaggaggcggggcgagacagcttccgactccgcccccagaggaatctctctgaatgcggccatgctgggatgtcctattgtaaccttagggattcagttctggcctagggtgcaaaatggaaggaatccccaacgcaaagcagaataaggagacttgcaatagttaagcgcattttatttcaatagtgttaacaagtgacaacagagagaacacgaacctcccattaggtgaacagttggtttgacccaagttaagatggcggtacccaggtttcccacacttcacccagctggcccccctttcttgaaaagaaccatgcgcgacctgcagagctgtagagccaagcattctgggagctgaagtctcttttgctctgacccctcgttttaaattagggtttcagcaacactttctattcaaacttggagttcggaagaagtgaatgaaagttggaccctaggaagggcatggcgcaggagtctgagaagtgaggatactagctctcaagagaccaaggcccaattccttcctcctacaggagtcctgccaagagctgtgcgtccaaaatacagtgtttttttttccttctatctgcctcccacccctgctctccttgcccgagctacctccccaaaacagccacaaagcactttctaccatgcagagctcatcatggtctccctatggtcaaaaatctcccatggacctctttatgcaccaaagatagcccaaactcttcacttgacattcagagtcctccataatttggccaaaccctcctttccagcctcctattctgccactctcttctcaaattccggaagattccacccacaagactgcaaacaattcctggaacttagctgtgttgcctccctccctttacactggcagttacttctcttactgtcacctcatggactggataatttctgtatgccgattgaactaattcagggatcctttcctctaggggtctcctctctgtttaactccctccaacccagacactatcagtcagtaacctgaggacctcagtctgtctcctccatcagactgggagcccccagtggacagggctccatctgatgatcaacctctcctttgcaggccctgataaaagctgaagcgtctaagagttgctgaaaggagttcaagtattagtctcacctctggtgggacagaggtgtgagcactggaacgagggtgaggaggccaggttctttcagtaccaaccattatccctaactgtctcagaatagctggttgtctcaggaatgggcctctccaccctccacagccctgccttcacagtttgtcagctgactagcacctctgctcccaaagaggcacctcttccccatgtggggttagggctggtggtggctgcagacttatagtgatggcctcagggaggtggctgtggccttctctggacctcatctgctagacagcttgtgacatctgatcccaattgcctgggaacccacaacagtttttctctcagtgtcctgtaactgggcctcaatttccccacttgtggactgaggaggttatacaagataatcccaaagtttctgggaagccatcttccaggaaatgatacccttctacctacctctcgaacgtatctttttggctcttgtggctttgtttttcccaactgtattcacatttgtttaactcacaacaattcatcatttgctatgagccagacactgtgctaggtactggggatgtgttatgaggaagacatacaccagttgctcactggtggagcttaccttctaaagtgagaagcaagtaatgcacaggtaaacaaatgcataaacaaagtaatttcaggtagcaataagtgctacgaaaggaaaagataagtagctgtgaagtatagagctttagcttgagtggttcagaaggtccctttgagaaggaaacagtaagtgcaaacgtcccaaggcaggaaagagcatcacaagtttgaagaaggaggccatggtggctgaagcactgcaaataaagggaagaagaggaagaaatatggtgggagaggtgggcagggcattcaggtcatgataaggaagctgggttttcatctgagtgtagtgaggatatttcccattgcttagccttcatgcctttccaatctcagcctctctcacagcattagttcttcattcttcttcctagttctggcctctatccatgacttcattcagagggctcacctgggcacacatatacaaccctcatactcatgcaggacataattgaaacccaactcctgccgtctactacgccagcctcatgtaggtctccggtctcaagaggcttcccatcccaagtgttcacctagttgtagacttaacatttatccttaactcttactgtctctgatcccccacatcacacctctcaggctagtctttctgcaaacaacagcagcagaagcaagagttaagatgttgagagtacttgcactgtgccacacactgaatgttcatcatctcacttaatcctcatgtcaacctgatgaggtagaaaccaaaagtatctcaccgtacagatgaggagactcaggttcacagagatcacaggccatgcccaaggtcacatgccggagatggagcttgcatttcaacctgggccattagagtgactctctctctctctctctcttttgagacaggatcttgctctgttgtccaggctggagtgcagtggcatgatcacagctcattataaccttgaactcctgtgcttaagcgatcctcccaccttagcctcctgagtagctaggactacagacatgcaccaccatgcctggctcatttttaatttagtagtattattattactattattattattgtacagatggggtcttgctatgttgccagggctggtcttgaactcctaggctcaagcagttcccctgccttggcctcccaaagtgctagaattacaggcaaaagttttaatcatgcactaagaacctaagtgtatttgctttctattgctgcttaacaaaatcaccccacaatatagtggcttaaaacaacaatattttatgtttgtgtggattggcagtttggacatgtctcagccaggacagctcttttctgctccaagtggtctttcctggcttactcttacgtttgctgtcagtgaacaggccagcaaactggttagaactccatggcctcattcacatgtctggcagttggttggggttgttggcttgagtgccttggttctcctccatgttgcttcttcagtaagctaactcaggcttacttacatgacggcccccagaagaaagaaaacaaaagcagcaagatctcttcagatctaggcttagaaatgatatagcatcattttcactgtattatatcgatcaaaggcagtcatatggccagctcagattcaaggagagtagaaatagattccatctcttcatgagaaaaacatcaaatcatactgcaaggagtcatgtgtataaggagggtggaattgttgtggccacctttgcaaacattatatcacataagtaatcgtaggcatggaactggttaaagaaattatggtacagccagacatggggctattcacagcaatgagaactaacatttttgagcacttaatatgtgtcagacactgtacaagatgctttacatctattaactcatttaatcctcacaacagctctctgtggccagtacatttttaatccccattttagagattaagaacaccaagtctcagagaggttaaacaactagtccaatgtcacacagcaagtgacaaagccattgaaaagaatgaagacagtattatgtcctgacatagaaatctggccctgacattctgttatacgatacaaagcaagagacaaacagtagtttgatcagaaaacatttaaaaagcacatttaaataattaggagatgtgtgtcttttttttttctgagatggagtttcactcttgttgcccagggtggagtccaatgatgccatcttggctcactgcaacctccgccttctgggttcaagcgattctcctgcctcaacctcccgagtagctgggattacaggtgcccaccatgcccagctaatttttgtatttttagtagagatgggatttcaccatgttggccaggctggtcttgaactcctgacctcaggtgattgcctgtcttggcctcccaaagtcctgggattacaggcatgagccactgcgttcagctggagatgtatgtcttataaaaattagtagaataaaaatttttatgtcttataaaaattagtaggccgggcgcggtggctgatgcctgtaatcccagcactttgggaggccaaggcgggtggatcacaaggtcaggagatcgagaccaccctggctaacacggtgaaaacttgtctctactaaaaatacaaaaattagccgggcatggtggtgggtgcctgtagtcccagctactcaggaggctgaggcaggagaatggcgtgaacccgggaggcagagcttgcagtgagctgagattgcaccactgcactccagcctgggcaacagagcgcgactctgtctcaaaaaaaataaataaatacaataaattagtagatctatatgtcttatagttttagataaattcaggaagaatttactacaaactattaatggagcttatctttgaagaggagaaaaggagaaaacttttatttaaacacctctgtttgtgttgcttgaatatttttttttttttttttttttttttgagacagattcttgctctgttgcccaggctgaagtgcagtggcaatggtcacagcttgctgcagcctcaacctccagggctcaagtagtccttgcacctcagtctcccaagtagttgagaccacaagtgtgtgccatcatgcctggctaatttatttttatgttttgtagagatagggtctccccatgctggccatgctggtcacaaactcctgggttcaagtgatcctcccgccttggcctcgcaaagtgctggaattacaggcacaaagcctggccttctttgaatttttttatagcaatcataaatttttatttcaataccttataaagaagaaaatgcttttaaaatgtccttcaacttggctcccacctatgtctttttctatttggttttatttttattgttttttgttttcttttttgataccaccccagcccaaccccttatcaattctgacccgaagttttgtggctaccttgagggcccctcctctctccctctgtagttcatcctgcctgctgctgggggaaagctcattaaccatcatgttccatttttgtctaagagttttcaatggtattgcattgtctacacagaaagtccaaaccctttggccttgtacattgggtgtttgtaagtttgactccaacttggttggattccagctctgtcacttactagcagcatatagttggataagttattagatctctctgagcctcaatttccacatctttttttaaaaaaatgaaagaaaagaccaggtgtggtggctcatgcctgtaattccagcactttgggaggctgaggtgggtggatcacctgaggtcaggagtttgagaccagcctggccaacacagagaaaccctgtctctagtaaaaatacaaaaattagccgggcatggtggcacatggctgtaatcccagctactcgggaggctgaggcagggagaattgcttgaacctggaaagtggaggttgcagtgagccgagattgtgccactgcactccagctgagtgacagagcaaaactctgtctcaaaggaaagaaagaaagaaataaagaaagaaagaaagaaagaaagaaagaaaaaggaagagagagagagaaagaaaaagagaaaagaaagaaaaggatatagcattacatattttgtggcaaattagattactgttcagtgactgttcactttctcacccagccaggggcaattaatattttcctgccccattaatattaggcttggccatatggtttgctttggctagtggaatatacatatcagttacaatgtgcaaattccagcctaggccttaagaggtctctcttgttttcaattggctgtcttagaattttcacctcttccttgaagggcgagctgtcattggtgccttacatcttttgaaacagacttccaatcaaggctgtagtaggcaagtctgagataagaatagttctttactctttagttttagtttgcattaattaaattataatttatagtttttcgtgaactccatatttttgaatgagcggaagctaaagaggtgggaagagaatgctctgtctcaatttgggaaagcagtagcttctgtccaatcctccagcatcaaacaggctagtcctagaagaataaaggacacacatagtagatctgaaattgagtcaaccccagcagaacccagccaagatcagccaaacccaaatgactacatatgagagagggagaaatcaatgtttgcttctgtcagcacagagtcttggggcagtttgatatgcaacattattataggaatagccaactaacagattcacatcatagggcttttttcagggttaaataaatgaatacaggaaacgccttaaaaatacactggcatatagcaagggtgtaatgcatgagaactactattattgggggtgcaactgtgaacaaaacaagcccctgttctcaaggatcttatgttctgcggagagatgtatggaatggcagctggtgatgagtgttatggaagaaaataaagcagggaaggagagggagtgctgaggtaaaatttcaaatgtgatcatcaacaaaacttcaacggaaggtgaaacttgaccaaatccaagaggaagtgaggcggggagccagaaagtatgtgggagaagattgtcccaagcagagagaattcggatgggcaaagaccgtgaagtaggctcatgcctggtgaatttcaggaatggtcagtagatagggcagctgagccgagggagtggctgatctcgtctcggctctgctggggttgactcaaattcaggtctactgcatgtgtcttttgttcttctgggaccagcctgtttgatgcaggaggtttggacagaagggggacaatgtctcagaggttcacaaggtactggattgtgcacagccatgtagggctatcgtgaggacttgcttctgctctgaatgaggtggggagctatgggagggttttgaccaggtggagagcaggctctgctatgcatttttataggatttgtccagctgctaagtgtggactagatggaccgggaatgagggctgaagcagggagaaaagataagaagctactaccacaagccagacaagagatggtgttgctttgaaccaaagttggactccgaggttcttttcaaagtaaaatcaaaagaatttactgataggtgtggtatggggtgtttgaggaaaaaaagaattgaggatgactccaaggcttctggcctgaggaactgaaagaaggaatttgccagtaactgagatgaagaaggctatagaagagaacttcttggggcagggggagaaagagaggaggaattagcagttccatttgcgacttgttaaatttaagtgagctatgagacttccaagtgcagatgactaatcagaagttagatgtatgaatctgagcccaggagagaggtccaagctggagacgtaatttttgggagttactatgtactaaattttgtcctccccaaatttatatattgaaaccctaacacccaatgtgacactatttggagacagggtctttaaaggaggttaaaagagatcatagagtgggccctaattcaacaggactattgtccttacaggaagatgagatatcagagctcattctctccccatgcaggtgctcagaggaaatgctgtgtgaggacacagcaagaaggcagccatttacaagccaggcagagagccttcaccagaaaccctccctgacagcaccttgatctcagatttccagcctctcagtgagaggctgaactgtgagaaaataaatttctgttgtttaatcctctcagtctgtggcattttgttatggtagtttgagcagactactactgagtcatcaacagagaaatggtttttaaagccatgaggggccaggcatggtggctcacacctgtaatcccagcactttgggaggctgaggtaggcagatcacttgaagtcaggagtctgagaccagcctggccaacatggtaaaaccccgtctctattaaaaatacaaaaattagctgggtgtggcggtgtgtgcctgtaatcccagctacccaggaggctgaggcaggagaattgcttgaacccgggaggcggaggttgcagtgagctgagatcgagccactgcactccagcctgggcgacaaggaagaaactgtctcaaaaataaataaataagtaaatagccataaggctgggtgaaattgcccagggaatgagtgtagacagagaaggaggaccaaggactgcgccctggggcatccaacagtaagagacaagcaaccagcaaaggagcctgagaaggagcagccagtggggtaagtgtcctggggaccaagtgaaaaacgtgtttcatggaaggagtgttgatcccctgatcccctgtgtcagatgctgctgaggggtcagaaaagaaaagaacaaagagctgatttacaaagtggaggacattgttttgacaggagagagtgtaggtaggttggtgggaacaaaagtctgattggagtgggattaagagagaataggagaaaatataaatatagacatagaaaggaaggaaaaaaggaaggaaggaaggaaggagggctctttttttttttttctttttgagatgggttctcactctgtcgcccaggttggagtgcagtggtgtgatctcagctcactgcaacctccgcctcccaggttcaagcgattctcctgcctcagcctcccgagtagctgggattacaggtgcgtgccaccacgtctggctaatttttgtatttttagtagagatggggttttgccatgttggccaggctagtctcaaactcctgacatcaggtgatctgcctgcctcagcctcccaaagtgctgggattagaggtgtgagccaccacacctggcctggagagctctttttaagagtagaaagctgggccaggcgcagtggctcatgcctgtaatcccagcactttgggaggccgaggcaggcggatcacctgagatcaggagtttgagaccagccgggccaacatggtgaaacccagtctctactaaaaatacaaaaagttagccaggtgtggtggtgcatgcctgtaatcccagctcctcaggagactgagctaggacaattgcttgaacctgggaggtggaggttgcagtgagctgagatagtgccattgcactccagcccgggcaatgagagtgaaactctgtctcaaaaaaaaaaaaaaaaaaaagtaggaagcaaatgactaaatgtagaagaataggagttggcaaccaccataggagacaatcattaatggacactgcagtagtggattaaagtttgatgagaaatagggcatttgcacagtctgagaatatctccccccaagatacttattaattacaaagggtaaaatagtaactttacatggagaaacacagccaacaccacttgaccaagtgataaagtgaacatcaccagtagcagggcaaattgacatcatgtggcttccgggatgatgcactgagtgggacgtcgcgtcacgtcagtgatatttctgccaaagaggcataattgactcatgaggaagcattagaaaagcccaaagtggccaggcacagtgactcacacctgtaatcccagcactttgggaggctgaggtgggcagatcacgaggtcaggagttcgagacaagcctgaccaacatggtgaaaccctgtttctactaaaaatacaaaaattagctgggcatggtggcgtgcgcctgtagtcccaactactcaggaggctgaggcaagaaaatcgcttgaacccaggaggcagaggttgcagtgagccgagattgcaccactgcactctagcctgggcaacagagcaagactccgtctaaaaaaaaaaaaatgtccaaagtgaggatatctttgcaagagaaccttactctttaaaaatgttgaagtggtaaaagacaaaggaagactgaggaatagttttagatgaaggagaataaagtaattacaactactgaatgcaatgtgagatcctagattaagaaaaaatcattttcacttactacaaaatatattaactagatgagtggtgaaatttgaataagatctgtagattagataatggttttgcatcagtgtaaaacgtcccgattttggttattataagagaatgtccttccttttaggaaatgtgtactggtttttaggcctgtaacttaccataaaagagttcagggttggaggaaagaaaaataaatgataaagcaaagatggtaaaatctgggtaatgggtatttggctattctgtttttgtttttgagacagggtctcactctgttacccaggctggagtgcagtggtgtgatcatagctcactgcagcctcaacctcccaggctcaagcaatgctcccacctcaacctcctgagtagctgggaccacagttgcgcaccaccacacctgactcatttttaaatattttttagagatggggtctccctgtgttgcccaggctggtctcaaattctaggctcaagcaatcctcccatctcagccttccaaaatgctgagattttaggtgttagccattgtggctggtgagatttgagtgttctttgtactactttgtaacttttctgtaagtgacattatgtcaaaataaattctaacaagagagaatagaaggaaaggaagtagagacatggaggcagtgagtccaggtaactttttgaggagttttgctatagaactgaggacaggtggcaggtggagagcaaaatggggtcaagataagttgttcaaaggcagaaattgtagcatgtttttatgctgatgagagagattcagtagattggaaaaaaaagtaataatgcagacagagagagagaagagagtggctagaatggtgtctctggagagaaggatgggatctagtatacaaatgggggctttgaccttggagcacagatggctcatccatggtcacagaagggagggcagagtatttgggtaccagattggtaggtaggtagctgtgcagtggaaatgtgtggaaatgctttctgattgctaccattttccctgtgaaataggaagcaaggtccttggctaagagtgagaatgggggagaaggtgatggaggtttgaaaagataggaaggaagtgtgtagggaaaatgaatggatctactgtgattgtcaggcagaacaaaagacaccactgaagctatcatcattcaagtaaagtgaggccagtctacatggtggtgtgtttttctccagccacattccactgcagggggacaaacacagagggatgtggagttggcaccaactaacaggtgtttagtcagagagggtcagggggatcttgggagtatgcagcacagtggggataaagttatatcatggctgtaatccacaaagaaggaagtgaggacaaggaaacaccaaggttcagagaggtttagtgacttacccaagcttgcacagctagtgaataatgagttggtctctgcatccaggcagtgtggctcaaagcttattctctcaccaacccagtatacacaggctgtccccagggtgtagcatagcatttggcacatgtagcctctgctaacaagtgaattaaattgtacctggggttctctctgcctttcattctatgcctccgaagaatactaaataaaataaaataaaacaacaacaacataaaaacctagcttcttccttgccttcaagctgtctttgatgtcttagtgtgcacgatgaaggagatgtaccatcagtctcctttgggtggccattggttcatgcctgcagtctggctttcagcaggtcattctcagcacatactctggggcagacactttctcaggttctcagtacacagcgggaaacaagtcagtattcctggcctggtggagctcagtcaagtggggagaagataagcagacaaatctagcattgcaaactgggattatcgccaggagagacaagtgggcggggtatgagagtgcatgagagtaaagccgacctagtggagggcgggaagaagagtttacccaaggaaggtcaggaggggtggcccatggggctgactgaagaggagaaacagcatgggcaaaggtcctaagataggaacatgcctgttaatggcatatcaaggaggccaatgtggtccagacgtatatggagagggtggagggtgggagggaacatagtgggaaatgagatgggagaggttggcaggatccactacaccctgtagaggaatctgatttaagaacaatagggtttaagcaggggaatgatttcgtaaggttttacatttatcagccaggtgcggtggctcacgcctgtagtcccagcactttggaaggctgagatgggcggattgcttgagctcaggagttcaacatggggaaaccccatctgtaaaaaaatatacaaaaattaggctgggcgtggtggctcatgcctgtaatcccagcactttgggaggctgaggagggcagattatgaggtcaggagatggagaccatcctggctagtagtgaaacccctggctagatggtgaaaccccatctctactaaaaatacagaaaaattagccgggcgtggtggcaggcgcctgtagtcccagctactcgggaggctgaggcaggagaatggtgtgaactgggagatggaacttgaagtgagctgagatcatgccactgcactccagcctgggtgacagagcgagactccgtctcaaaaaaaaaaaaatatatatatatatatataaaatacaaaaattagcagggcgtggcatcatgcacctgtattcccagctacttgggggctgaggcaggaggattgcatgaacccaaggagttgaggctgcagtgagccgagatcaccccactgtgctctagcctcaatgacaaagtgagatcctgtctcaacaacaacaaaaaaaattttttttatttataaaagacctctttggctgctgggccaggagcagggaggacaggaggcaggggtaggagtggaggtgtgggaggagaggaagcaggagaggagtggaggtgtgggggcaggggaggcagtgggtgggccaggagagaggtgatgtggcatgggctaagatggaagcagtgcagataaagagaggtggattgacttgggacatattttggagctggagttcaccacagggaaactgaggcccagtgcttccaaggatagcgctccagctctcccagcccaatggaagcttttagatacttctgcactgtgggggtcacttgtgggtggttgcattgggggacgagtggccaggacaggtgacctctgacttttgtctggtgatgcgtgagtctcagattgggctttgaaggagccatgggtaccttgctgggcaggtggagcatgtccttagaggatcatcccaccatcctcacgtaaccctgcaggtctcttctctctgagtcatagttctcacacttgtaacatgaagagggacagtacccacttaggcgacatcacccccttcttacagatgagacaactaggccaggtacagtagctcatgcctgtaatcccagcactgtgggaggctgaggcaggcagatcgcttgagcccacacatttgagaccagcctgggcaacatggcaaaactctgaatctacagaaaatacaaagattagctgtgtgtggtggcatgcgcctgtagtcccagctacttgggagactgaggtaggaggatcacttgagcccaggaggtggaggttacagtgagctgagatccaccactatactccagcctgggagacagattgagactttgtctcaaaaaacaaaaacaaaaacaaaaccaccaccaccaccacaacaaaaaaacccaaaagaaaacagatgagacaactgagcctcagtgaagggaagtggctctttagggtcatacaggagtaaagacacagccaagactagcacccaggctagagcctgggctgttgacctttctgcttcatcatttgcctcccatacctttcctgggctcgtcagtcctggggatgctcaactcacccaacactgtgtttcaagcccagggaatccaggatcggttagttcagtggttaggggtatgggctgcttggattctatttccagcgccaccaaggggccttattctgtctgaaccttggttttctcctctgcaaaatggggctaacagtgcatacccttgtagcactgttacaaggtaggggaactgtacagatgtaatgatttgtgtatgtgagtcatttacaagcctttggagtggctggcacccatcattgtttgctgttgctgtgattatcatgccattggactgtggcttgaaaccctacaggcccaaggctccctttaatagtagttataatgcttcttttctaaaataaaatacatgaataacataacctgctgacgcacataattttttttttttgagaccgagtctcactctgtcatccaggctggagtgcagcggcacaatctcggctcactgcaacctccgcctcctgggttcaagtgattatcctgcctcagcctcccgaataggtaagattacaggcgcatgccaccatgcccagctaatttttgtatttttagtagagacagggtttcaccatgttggccaggatggtctcgatctcttgacctcgtgatccttccgccttggcctcccaaagtgctgggattacaggagtgagccaccgcgcccggccatgcatagttttaaacataaataatgtcctagttgtaatttaaaagaaaataaagtgaaaataatttagaataaattaatatgtaaatgttccaggacaatgtgtagaaaccatcacaaagtagttgggtgggctctgctctgggtggaatcattgagaatctgcaggctgaattggtaacgccgcactggcggcacatgcactgtgactgcatggctgtgatagtctgaaatgtgagcagtctaggtaaagttctgaaccaaacacaatccattctgttcccaatcgctacagactaaatgtttgtctcccccaaaatcttacgtcaaagcctaatccccagcgtgatggtattaggagatggggccttttggaggtgattaggttatgagtgcagagccctcatgagtgggattagtgcccttataaaagaggccccagagagctctgctgccccttctaccatgtgaggacacggtgagaagccatctatgaaccaggaagcggtcttcaccagacatggaatctgccagctcctggatgttggacttgccaggcttcggatctgtaagaaataaatttctgttgcttataagccaccagtctgtgtaatttgttacagtggcctgaactgactaagacaccaatttatgtgaaggttgctttcctggcagagtcgctgttattaaaaccaagcaaacacacattgtactggaaaaggcaaaactatagagacaatgaaaagatcagtggttgccagggctcaggggaggggagagagggatgcacaggtggagcacagggcatttttagggcaggggacctcttctgtatgatgctgtaatggtagataaaggatgtatgtacttgtcaaaacccagcatgggccgggcgcggtggctcacgcctgtaatcccagcactttgggaggccgaggcgggcggattgcctgagctcaggagtttgcaaccagcctggcgctacagaaatcctgcttcaaatccagaaaccccgtctctactaaaaaacacagaaaattagctgcgcgtggcggcatgtgcctgtagtcccagctactcgggaggctgaggcaggagaatttcttgaacccgggaggtggagggtgcagtgagccgagatcgtgccactgcactccagcctgggtgacagagcgagactctgtctcaaaaacaaaaaacaagcaaacaaaaaaacaaaaaaaaacaaaaaatccccagcatggtagaactgtgcaacacaaagagtgaactgtaaggtaactgtggatttcagttaataattgtgtgtcaaaattggtttatcaattgtaacagatgcaccatgcatttgcactaatgcaaaatgttaataacaggagaaactgcatgtttggagaaggagtacaagggaactgtctatgatttctgtgtcatttttctttttcttttctgagagagggtcttgctctgtcccccaggctaaagtacagtggcacgattagagtccactgcagcctcaaactcctaggttcaagcaatcctttagcctcagcctcccaagtagctaggaccacacacatgtgccaccatgctagggaaattaaaaaaaaaaattgtggagacaggttcttgctatcttgctcaggctggtctcaaactcttggcctcaagcaatctccccatctcggcctcccaaagcactgggattacaggcgtgagccagtgtgcccagtctctgcacagttttgctctaagtctaaaacttctctaaaaaagtagtctattaaacataaaaaacaaaatgaaaacccccacacattgtgtttatatgtaaaatagaattcggtccttggctcagataattaaaaacaaggtttttacctacactaattaccaaagggagatttgaaaatcatgacttgagatgcactgcaggatgtctgcacccttgctcccctcctgcatggccggggcaccccctggtcactgggaactctccaacactcttggtgacattgcccccttgaggatctctgcactggatctttgctccctctcctgcagaacccacaactgctgacttactgatcttgggtgatgtctgattaaaaagtctccccaggcttaggaaactcaaggtgccactgtggacacagctcccacatttcagcttccagaaatcctgcttcaaatccagatcccagcactccctcattatgtggacttgaatgagtcacatcaatttattgagcttcagtttccccattgatgggaaaaagggtgattgataatacctgccatactttatattcataatgaatataatgagtatattcattaactcagtaaatatatattgaacacctactgtctgtgctgagaattcaacagcgagcagaacaaacatctctgccttattggagcttatggtctcgtgatggggacagacaaaaatcaaacaaatatatgagataatgtcagtgataaataaaaataaggcagagtcacagatggaaagagggtagggcaagggatccttggtaagtgtcgtcctggatggcttcccagaggagatggcatttgaacagggctgggaatgaagtgaaggaacgtgccacgaaagtctcagggcgaagaggcaacagcaaacaccaaaaccctgaggtgggaatgtgcttggtgaattcgagaaacagcaaggaggccagtgaggccggtggggagtaagagggaagagaaagtgaggacagagagatctggagaagccagactctgtaaggaattgggggtttatcccaagtgcagcagggagaaaacttgaagagttatttactggggaaggcttcctgtgttgtgtgcccttgcaggtgagaaaaggtgatgagcccactctaaagccaactctatggcccatgaccgtggtctgggacactttgagcagaaagcgtcctgttctccttggagtcaaaggattggtgacagtgtctgccatgctgtagtttccacaaaataccaccaggtgacgactctgggtcacgcttctaacttgtgggttcttgattcctggagggcttttgctaaaacacagactgctcctggccccagccttccaaagcgctggattacaggtgtgagccaccacacctggcctgacagccatgtttttagcttttaaaagcaaaactttggcattagcactatctctgtgagaggggccgatcattcctgttttccagatgggtctatgaggctcagagaggagaaatcattgtctccatgagcaaaagtgataaaactggcactcggcccccatgtctgcctgacttcaaggcccccaatccttcagggatgccacacccatgtgcccagtgaggctctgggaattttaaaaactcatccaatttaatccttacaactgaacaaatcccatgcaacgttaatgtctccattttagagatgagaaaactgaggactagaactgagaaataagtcacctgatgtcgctgagctgttctaaggctgacatcatgcattttggagtcagagagacctgaatctcaactctagctcacactctccctagctatgttcacctgatttctctgagccacagtttaagatgggaataagagcccctcctgcttggtagctgttggtaatatttatgaacaaatctaggcctggggcctcttaggcttacagtggcaccagcctcttctgttctggaatcaggagggaaagtgattgacccggcattggccatccctggcctggctgggatcagaagggtcctggaaggataggcagtacccggcaaagactggggagggagcttgcttagcagaggtgtgagggacctcacaggagtccccacagggtgtccaggtaggcataggtatggacggctggacagggactccagttggccaaccaagaacagggatagagcttgggctttggggtcaggcagcttgaagctctgggttccagctcccagatctgtaaagtggaacagtaatgactcttccctgttttggattattgagaggaccccggggaacagtgggctcagctggagggatgacattctaaagtgttctctgggaccttaaccccagtctcacaggagatgggcctttgactgtggcctttctgaaacctgagaatgttaatggtcacataacgttagtaacagtgatggcagataacatctgtcatggattagaggccactgggaggttctccctcacagttctgggttctttggatcagaaacatggcacaaacacacagccaagggtggtttagggccttgcaacttacaaagtccttccatagcattgcactgcaccctgtgttaagataaattctccaagctttaagcactctgctaagtgcttgacaggccttattttattcttccaaaacactttgaagtgggtgttgccttgacccccattcttcagctgaggaaatgggaggcatagtgaggtcaagtgacttgcctaaggctactcagctggaacgtagagcgcctcatcccatgcttgactctgagtagagcaagggttgcacagcaagtcagaggctgagagggccttggaaggacccgaggctcccctagccactcctgcctggcaccgattcctccaatcccacctggaagtggctggaagtgagagggagaggcggtaggggtgctgagcctgaagggaggtttcaggactcaggctaggaaggcagagaaggagaggagggacggaagtgccccttccccctagagccactgaggggagagataaaggcatgaggagatgtagctggggccaagacaaggaggaagagaagagctcaggagctagaaggaacaactatctggggaggaagccccgttccaagagagaaggccagggatgggaaggggtgggccaggcccttgggctggggtcctgggtcccagttttagcaggtagcaagaccccgaactggatagagggttgccttcagtagataccctatcattcctgtgttatgagaggttggggccacttgaggtgagcccaggattcagccttcgaggctcaacacacttgagtccagctgaatgacagaatgagccataggacactgtcccaggcctgacttccttccttcaacaaatatctatggaggattcaccaagggccaggctgggctcccagcaggaaacaaagtccctctgaagagagactaacaccttcgttaaggagcccccaatctcataggagagatggacaaaaagcagaaaatgaattggtatccagtatcacttttggctgtaaaggtgatcaggggaaaatgaatggattggagtctacctattttgtgatggcggtcagggagggcccctctgagaaggtgtcatctgcacagaggcctgaaggagatgaggcagtagctatgaatctgggggaagagcatttcaggcaagcgcaaaggccagggcaaaggccttgaggcaagaagatgctgctgtggaggaaggagggcaccaagcaaggaggccagtgtggctgctggtgagagataagagagtgaaggaagatgagggtagagtccggggggcagatcacatagggcctcaaaggccactctatggattttagctgcatctcatgtgacatggacattgaaggatttttatgtgtgtgtgtttgtttgtttgtttgtttttgagagggattctcgctctgtcacccaggctggagtgcagtggcacatctcggctcactgcaacctccacctcccacattcaagcgattctcttgcctcagcctcccaagtagctgggattacaggtgtgtaccaccacgcttggctaatttttgtatttttagtagagacagggtttcaccatgttggccaagctggtcttgaactcctgacctcaactgatccacctgcctcggcctcccaaagtgctgggactacaggtgtaggccactgtggcctgtgacattggaaggttttgagcagaggtatgtgttgtgacctgactcaggttttaccagaatccccctgagagatgttctggccaccactgaagaagactggagggtagagcaggcaagggctgatgcagggagcccagtgaggaggctggtcaatgagcacagcagtttggccaacgatctggggtgctaaatatcaacagaaacaaaaatatttattgcatgctttctgtgggtcacaaactattctaagtggttgcttgacatggaatgcttttaatcttcagtacagattttaggtagatcatatttttgtacatttatgtctatttgtctctggactgatttttttttaattgagatgaaattcacataatataaatcaaccatttgaaagtatacatctcagcggcatttagtatattcacgacattgtacagccacacttctgtctagttccaaaatattttcaacaccccccccaaagaaactttgtacccatcaaagatagatgatatttttatcctaattttacagatgaacaagcagaggcgtggacaagcagagtcacgtgccccaggtcacacagccaggaaatggaacaagctggccacaggtgttgggaggaacatgttgacaagctgcccaggatggcctggaggccccttcggggtcccccaggtaatagcaccaaactgccttttatttttatttatttattttgagacagaattttgttcttgtcacccaggttggagtgcaatagtgcaatcttggctcactgcaacctccgcctcccgggttcaagtgattctcctgcctcagcctcccaagtagctgggattacaggcatgtgccaccatgcctggctaattttttgtatttagtaaagacagggtttcatcacgttggtcaggctggtctcgaactcctgacctcaggtaatccaccgcctctgcctgccaaagtgctgggattacaggcgtgaaccatcatgtccagcccaaattgccttttaagaagggcatgtcagccgggcgcggtggcttacacctgtaatcccagcattttgggaggctgaggcgggcggatcacctgacgtggtgagtttgagaccagcctgaacaacatggagaaacccgtctctactgaaaatacaagattagccgggcatggtggtttatgcctgtaatcccagctacttgggaggctgaggcaagagaatcacttgaacctgggaggtggaggaggttgcggtgagccgagatcacgccattgcactccagtctgggcaacaagagtgaaacaatgtctcaaaaaaaataaaaataaaaataaaaataaaaataaaaaaaagaaggacatgtcctcacttctgggcttttgttttgtggaaggggtgggatacatttgaggccagaaaacagaaagcactgggaaggctgaacagtggcccctgcaccctctctcaggatggtgcacagaggagaatggggactctggagccaggctgttgagttcaattcccttctcccacctttcttccatgttgtgaagttgggataataagagcaccaatctcatcagtgttgggggaaagtgaatttcccatcagtagagctcagcactgcccgtagtatttgctcaatcaacagcagcctgcattctctttgctgccctctccactccaggaaataagttaagcaggtacctaaatgcaatctcagtgttgggcctcgtaaaacatctgggacaagacatcctccattaccagaaaaaatgcagtcataaaaatctcaaggttgacaggatagtgcccatttttatttatttattattattattattattttgagagaaagcctcactctgtggcccaggctggaatgcagtggcacgatcttggctcactgcaacctccacctcccaggttcaagcgattctcctggctcagcctcccgagtagctgggattacaggcacctgccaccacgcctggctaatttttgtatttttaggagagacagggtttcactatgttggccaggctggtctcgagctcctgacctctagtgatctgcccgcctcggccacccaaagtgctgggattatagatgtgagccaccgcacccggccctgatacccatttttaaaaatcacatacaatcaaaattcaggatataatttacataaaaacaaaagcactcattttgtccatcccttgctttgggtttatctaccggtcttgttgactccattgctaatatacatccaggtcccatcccatcttcccaacctttcccagtctttcatccttcagctgcacctctatggcaaggagccacctcatgaacatcagtttcagacttgacagctgatggccgggggtgcacatgggcttgtggagacacggtcagggagccctgggtctacacctgagtctgcctgggccgctgtccgttgtgtaatcttcatcaggccacatcctctctctgagtctcagttttcttttccttaaattggagatgaaaaagtctgtctcacttggcagtcaagaaggtccaacaggataacttcatccatggtgagagagtggaggagaggcccccaggaggaggcagggatctcattctgcgggtactgtacttggttctgggagtgggatggcagacaagcgtgtcactgtctttgttctcagagctttggttgtggaacgggaatgggaaggtaagggagggtacccctggcaggggcacagcataaaccagggtgtggagatgggatggcgaggcaggactgccccagaactctgtccccaggggctggcagtgctgagagggacagagggagaagcgattgtttattctcagcctcaggaggacgcaggagaatctcaggcatcaaatttagtgcagcacacctgcctaggcaaaactggacagctccacctcaactttgtagaggggcagagaaagctgtggggaaccaccttcctgctcttgtcatgaagtcctcctcaactggaagcccaagcttcaggccaggaacttccccagcagaggcagccttccccagggggccaagaccttggcagaatgtctggggtgctcatggcagcgcctctcacctggcccctgccaaatcagtttctgcttggcctctgcaggatctgacctcgttgagtccccagggcccagttctctgcctctgaggctaaaagtgagatcgtttcctggttgaggagtgactaaaagacttctgtgtgtagagactgggttttgctgtgttggccaggctggtctcgaactcctgaccccaagtgattcaccttaaggtgaatgtgtggctgtgtacgcgcacgtgcagagcagaaccatcactctgcttgggctaggcagctggactaatcgtccatttccccccgcccggaggcctcttccaggcccccagctgccctgatgggccaggtcagccccccccacaggagcccccagccgctccccattcggctttccttgtattgtgcgctgcctggtttctcgaggaaatggggcggctgctgggtgcgggggcggccgccagcagccccacccccttccccccattgtcactcctggcttctgcccctagcccctgctgctgacactaaaaatagacctgttcacagggagacggccccacccctgagcggggccccaggctcagtgtcaggttgggtttgccaagacagagctgccctggggactgaggtggctcagctgaaagaccggggtcgaaacacgttagggctgtgtgaccttaggtccccttttctcctctctgagcctcaatttcctcacctttaaaatggggtaaggctacctacctgctaaggttgctcttgacaatgaacagaagctgggtgagtcacaagcgcacttcgttctcgtcctgcccgtggtttggtgctgcctgagcggcttgagaacctggaggacagatggcataacacacgccttcatcttcaatctgccttgaatgattgccaaggacttccaaatccccctaaacagaggagctggaagagcccacttgggaatccaaaagtgtccgcagctctgctgtgtgagcccgggtaggtgcctcctctctggcatccatgagctcacacgtgaagtatgcagccaggctgggactcgaacctgtgtctgcagcctctgaagactgttttttccgctttaaggggctgcctccatgctgatgactccaaggacttcctggctgggataaccctgccttttcgtctacaaacacatgattcatggtgaaggaagatgctgggcggtgggcatggaagcctgagctgggggctgggtagttccccttgagcccatgcagatgggcagctgtcctcagatgccacccgcagccattgggttgggccctgcaaaggagatactggcatgtgtctgtctaccaggctcttttttgttgttgttcctttgtccttttttttaaaccatggaatatttcaaatatgggtctttcatatacattcaaaaccttgaactcttagaattacttttgtcacagttgcaatttttttttaaatttttatttcatttgtctatttattttttgagacggagtctcgctctgttacccaggttagagtgcagtgacctgatcttggctcactgcaaccttcgcctcccaggttcaagcaattctcctgcctcagccttccaagtagctgggattacaggcacgcaccaccatgcccagctaatttttgtatttttagtagagacagggttttaccatgttggccaggctggtcttgaactcctaacctcaggtgatcggtccaccttggcctcccaaagcgctgggattacaggtgtgagccagcgtgcctggcctgcaatttgatatatgtctatgtaattacctatctcccattaatcctgggccctagaacagggactgagactttattattaatccatgtattcccccccaaaacaaatacagtactgttattctcccacacagaccctgagagcaagcagacttgtctctattgtttgtgttttgggatttgtggggacaccttgtgacccagttttgttgtaaatcttgtccatggggttttggttttgctacctaattgctttgccaatttttatgtggggatttagaaagatttaaaagctgagttttccactgcagacatacccatattcccgaatcttgactctttctaaatacatatgtacatgagaaaaaaaaaatcagcactcaaggtattcagtgacaggtttctctcagaacctggaaatgctggaaatgaccactgttgcttagtcggggctcctttctttcttttttttttttttttgaggcagagtcttgctctgtcgcctaggctggagcgcagtggcgcaatcttggctcactgcaacctctgcctcccgggttcaaggaattctgcccaagcctcctgagtagctgggattacaggtgcatgccatgactcccggctaattttcgtatttttagtagagatggtgtttcaccatgttggccaggctggtctcgaactcctgacctagtgatctgcccacctcggcctcccaaagtgctgggattacaggcgtgagccaccgcacccagcctgaggctcctttcttatattttatgtgtatcaagcaaacttaggtacctggtctagttcttacacaaagagtgtacttccccacttaaaaacggctacattgggctgggtgtggtggctcatgcctgtaatcccagcattttgggaggctgaggcgggtggatcatttgaggtcagaagttcgagaccagcctggccaacatggtgaaaccctatctctactaaaaatacaaaaacattagcccggtgtggtggcagatgcctgtaatcccagctactctggaggctgaggtgagagagtctctcgaacccaggaagcggaggttgcagtaagctgagatcacagcactgcactccagcctgggtgacagagcaagactctatctcaaataaataaataaataaataaataaataaataaaataaaatggctacattaaaagtaggatttttagcttttgttccatagacctcttcggcatatggtgaagtggggatggaccccttctcaaaatgtggtttttttttaattagtctttttttttttttttttcaatagaggtggcgtctgactatgatgcctagcctggtctccaactcctgggctcaagtgatcctcctgccttagccttccagacagcagggattacaggcatgagctactgcacctggatttttttttaatgttttataaatgcataaaataaaatgcacgatattacaaaggaaaccaattatactgaaatgctattactgcaatataaacaagggtttgtgatgcagtgatgaggtgaacttctttattagtacattaaataacaagatggggaagcaggttgcaggtcaccatgaacgtaaacaatatgtaatgttatctgcaaccactgtgatatgaaatgaaagtatctttgacttctgttgtaacagtcactgctaaccctaccatgcttcttgatccacattcatacttgaaggaaatgctgcatttcaattagaggttagtgaatataaagttattttttcccacctaagttcatgaagtttctgagttctagatcaggtaaagaacccctgctaaaaattgtggctgtccctcacttgattcaaccagtctcttattgaaaagtcaccccacctcagcatttcttcaaatctcatccttatgcagttggggaaactgaggcccaggctggagaacaaacttgggtcattctgccctggggggattgcagaatccagtgtcctgattcccggctcaggttattttccagctcctcccctaccaggcgggtggcagggaccccccctcggccccacctccctgctcgccaggagcagctggcgtcctgtcccgagagtgacccagccccgccccgccctcgccccaccctggccggccagctgtggatgtgacaggaggcttggctctggctcactccggcacattcctggcccagccactgttttcctcttcttctttttttttttggtggtgactttttctcccatacccctcccactccttttcctcaaaaatgctgtgtctttccccagagggtccctctgggcggctccgggagggaaatgtggcctggatttcctggaacgcgtggagctggagtctcagcgctgggaggagggaagctgttggcagcagggcacccccccaacataactgggcctccctggagaaagagggtgagcggagcctcaatattccctttgcactgggccctctgagcagtggcacccgcagctgcagcgagtgggctgctgcctcggggatagtgagacgcctctaggaaaccgcggctctgtgatcttggggaagctgggcattctctctgagcttgggtttccttgctccttagaactgaggatgtgatctggatctgccacagctggtgggacagtccagtgaggcgatggctgtacatggtccctttccaaacagggaacaagaagcgaggtgttgggggcatctggggatgcaggtttgggggctgcatttggggcagcaggggtggaacagagaatttccatccttccttcttaccttcattcattcatgagacaaacgtgtatcagacaattaccattgtgcctctcggggctcacaataagagacaagtaaatgtctcctgtaggggcaggtgcagatgagtgctctaagaaaaagtgaagcagggtgcagggatagagtttctgagggtgctggggggagctgctctgctggggcaccacatgagcccaggcagagggagcagtgggtgctgaaggctctgaggtgggagcaagcaaggaagggaagagaaggcaaggtttgtgtggagtgggggagacagcagagagggctgtggggacttctgggtgaggcgaggactttggctcgattcatgggaagctacgaagggctttgagcctgcagtgacacagtctgtaaaggacccacggggctctacaggaggtgcgcacgtggaggagtgacttggaggccaagcagctggggtcctggcttcagctcctccctggctctgtgagcgtggacaggatgcttctccttgagcctcattttcctcctcagtagagtgggctcatggagctctgaagactaagaggaagggtcatcaaagtgatgaccctttgccatcactttgcctgtgagctacaggtctctataagtgggagctgtttttttctatgagcctctgaggattggagccacttgcttagggggaggctttggggacagagccaaaggctggttccgagcccaggtagagcagtggctgctcagattttggggacatgtggtgtcatgatctgggagggggatattcttgagttgtctgcagcccttttccccttatgggtacgtggctggatttagggaaccctagggcaagggaagaagggctaggagctgcccctgagatctgtgagatgggaggtggccgggtgttcagaggttctctgaggttgcagaatgccctgtcaaccactctcccatacccagagggggctggacgcatccctctctcccttgtcctcagtctcgattttctcatctgtgaggtgggcacaacaagtcctaatcctggcagtgataggaacgtttggggaagcagtgatttgtcatgcatgatgcggtcggacaggaccctgcccttaagaaggagggagcccacctgcccaggcactgtgctgagcttctgtgcattagctgaaagtggacaggatgacgtcacttcactggaactttctgtggcttctctttgctctcctatggaggttccatgggaggtaggagctgggggctaaccctgcataccttataaacctcaactctcacatcctcctggctttctgtgtccaggttcacaggcctcctgaatctccctccttaatgcccacgttgttctggcctctgagacattgtgttactccctgaattccttcctcttgccctagtaaactctccctccctgctcagctcagtttaactatctcttcctagaggaagcccaccctgtcctgtagactaggctgagtctcacattgcggcatcttaaggtgctgcctcctctcctggtaacacctgtcgctgttgtaatttcacaggtgttgctgcaattacctggttgctgactctccccacattaggactgtgtgttccatgagggcagggacgttttctcgatcacagccatatccccaacagtaatagcaaattgcagatgctcaataaatgctttctggataaatggaggggtgaaatcattttgacaatcagaagaagaaggtgccccccttttacagataaggaaccaaaggtacagagagattaagtaacatgccccgaggtcacacagccagaatcagatggtgtctgtctgggaatgtgtccctgcaagccaggcctagaaggtgggcagatggggttacgcagagaggagctaggaccatctggataagggagggttgtgggggcaagccccacccatccttgttttctccattcgaatagtggtttgtggctgttttcctcaagggcgactcaggtgaccttcaggttggggcctcctgggtcccaggggcctgctgggtggagggcccggtctggctgggctgcttttctcgcccctttgccggcccgctggcttcacgcacagattacaacttcccctcttcggccgtcttacgcaggccacctccggctcgccattgtctcattgtttgctgagggaagctccaggaggaaatcaacctgctgctcaccccaagcagggagtttcacccccagcccccacccagggaatgcctggggggagggcaggaggggtgggggcaggtagcaggcaatgcaacaggcagccttgaagggagtgagctccctggccgggaagtatgcaagcagaagctacattcacagcacctatttactaggtcctctcccaggctgcacgtcaggcagctggagacacagatgctagaaaagggtcttgtccttaaagaccctgtagcctagaagagatgctgggcagggcctcaaagccaaatgccttaggggccagacaggtgacagaaatctgtaggcctgcgagcaatgctgagtggtcgggacgttaaatgaaaactatggtgcgaaggaaggcttttagattccaattttattttaacatgttgctaatcaaacaaatgagtcctccagcctgatgtagactgcggaaccccagcctagccctttagaaaggaattcttgttctggggtgaaattggatcaatagttattggtgtctgcccctatgcctttagctatagctgtgatgggcagttcccagcacactgacagcatcccttttcaaacacccagcagtcatttggcttctctgaagacttgggaactctctcagggacctgggaggagttgatgccactaggggcacccctcagtcaatggggaatgggagttagtgggtaaatgccccatcctcttatccattggaagttcctggtcactcaaaggtctgcagtgagttgggggcactggttgcccatactggaaactggctcaataactcactttttatccgtttcccctcttcgctgtcactctcccagatccctctggcttcctgggctaccggctcccaaattcttgtctcaggctctgcttttaggggaacccaaactaaaacagtctctaatattctttccaaatagcttatgattgtacacttaggtgattctaatatccaatgactttaactctgtgattataagttttcataagtaaacccaactgtgattccagaatgatgtcattctaatatggccgagatacacctatcagaactggaatgctccattttgtacaactgaattttgcttctcttgagctcctattttttttttccgatgccagaaaatgcaaacttcaaaaaaatctagacaaaaaccaattatttcagatttgaactcagttgggtgaatcaagctttccctggcatcccttttttcccggattcatttaagtcctggaagggtagaggcatcttggcattggttgagggaagaaggggtctgtgactggtgtttctcaagctataccaacccatctggctctccagcatgcttctgcccccttggcattcactggagatgacccactcatgttgatgctttgatctctagggtcaaagaagcatagctttctcctcctggaccatacactgtaagagtcacgtccactccattcagtcatctgaaaagatgtgttcactttttacacctcacaaggccctgtatacaaactcgtcattcaatcaaatgtacttgctgagtatccggcatgtgttggcattgagccaggcactgaggatacaaagatgaaaagacaggtccctttcctcaagtcatttgcaagccaaataatgtataaatattttcaacttacatattgtgatgtccattatgaaggaaccaaatagggtaggcagagaaagcctctttgaagagctgtcattggagccaaagtctaaagtcaggggaagccacaaaaaggtttagcaagaaagacatgtctgattatatctgtaactgtaaaacattttctttttctctttctttcttttattattattttttggagacagggtctcactttgtcacacaggccagagggcactggtgcgattttggttcactgcagcctcaacctacggggctcaagcgatctccttcctcagccccccaagtagctgggattctaggcacatgccaccatgcccagttaatttttttgtattttttgtagagatagggtttcaccatgttgcccaggctggtctcgaactcctgagctcaagtgatatgcccaccttggcctgccaaagcattaggattagaggtgtgagccatcacgtttggccggtaactgtaaaactttttgtaatactgaaggcatctcctgcattttttcatacattttacttttcccctatttattggtggcctccatcaccttagagattcacgtctcaaaggacaagagtcatggaaatttagtcaaagccctgagtaatttgagagtgtacaatttatgccataaataatagattgagaagaatagatgagtcaaattggttttcctctttaggaaacgagataaagattatcgggaggtggggagaagggaagtgtagcagagatgtccagctgtcatgcaattacccgacttccccttcttctatagctgcagatggccatgtatctacactgcatttcgctgtctcccttgcagtttaggcgtggccacgtgaccaggctctggcaaaggatatgtgaaccgaatggtgtgtgcaacttctgggtcatgcattgaaagaaaaaaaggggcatcctcttcccacacctcttcttcccttcctgccagctagaatttggcatggtggcaggagcagtagcagccgtcttagaccacaagactgaagccacacgttgaggatgtcagaacaacaaaatggaaggatcccaggtatctgacgtcatgggactcatagcggcctagactgcttgccccctactggttagtgagagagaaatcaatagctgagttagcatcccaagtaatacagagggtcagaaatataggaaattagcctgttgctgtggctcacgcctctaatccctgcactttgggaggctgagttgggcagatcacttgaggtcaggttttgagaccagcctggccaacatggtgaaaccctgtctctactaaaaatacaaaaactagctgcggcatggtaggacatgtgcctgtaatcccagctactcaggaggctgaggctggagaattgcttgaacccgggaggcagaggttgcagtgagctgagattgtgccactgcactccagcatgggtgacagagcaaggctctgtctcaaaaaaaaaaaaaaaaagaaaggaaagaaatataggaaattagtgtgcatagacactggtgtaaccctgaaaaaagaatagaaacttcgtgtggtcttgaggggtctaaggtctgggcccagagccttaattctgggtagaacccaaggaagccatgaacctaactgcctgagtgtgtgtgcaggcacctggagcaggacacttcaggggaagggaggtgaactgaggggaaaaagcaaaagaagacacccagaattgaccaagattaagtttctcctacctagtggaatggaggctatttattttgggtgtgagctgagagttgtacctgcttcccattttattattattgtattattattcctggatcccagcccagcagttaacaggaacctgagtggaggctgagttttatcaataaatttttgctgagcaccaaggcccaggctcaggtcccagcctagctccctacttgctgggtggccttgagcatgttacttctcttttctgagccttggtgatctcattgggaacataaaggggttgaactccaggatgctcaaggtggctctttttgcattgatgtcctgtggtttttctctgggtctggcaatgagggcagttcaggaaaagtgtgataaaatagctctactttagttcatagagggacaagacacagtcacatgggcacacatgtacacacacacacacacacacacacacacacacaaatgtgattaaccaaacatcatggtagccaagaagatatgtagcattaaggtttagaatacaggctttgaagtcaaacagaccagagttaacaacctcattttgtttttattttcttttttaaaatttttttaaaattatactttaagttctagggtacatgtgcacaacgtgcaggtttgttacatatgtatacatgtgccatgttggtgtgctgcacccattaactggacatttacattaggtatatctgctaatgctatccctccctcctccccttaccccacaacaggccccggtgtgtgatgttccccttcctgtgtccaagtgttctcattgttcagttcccacctatgagtgagaacatgcggtgtttggttttttgtccttgcgatagtttgctgagaatgatggcttccagcttcatccatgtctctacaaaggacatgaacacatccttttttatggctgcatagtattccatggtgtatatgtgccacattttcttaatccagtctatcaatgatggacatttgggttgcttccaagtctttgctattgtgaatagcgccgcaataaacatacatgtgcatgtgtctttatagcagcatgatttataatcctttgggtatatacccagtaatgggatggctgggtcaaatggtatttctagttctagatccctgaggaattgccacactgtcttccacaatggttgaactagtttacagtcccaccaacagtgtaaaagcattcctttctccacatcctctctagcacctgttgtttcctgactttttaacgatcgccattcttactggtgtgagatggtatctcattgtggttttgatttgcatttctctgatggccagtgatgatgagcattttttcatatgtctgttggctgcataaatgtcttcttttgagaagtgtctgttcatatccttcgcccacttgttgatggggttgtttgtttttttcttgtaaatttgtttgagttctttgtagattctggatattagccctttgtcagatgagtagattgcaaaaattttctcccattctgtaggttgcctgtttactctgatggtagtttcttttgctgtgcagaagctctttagtttaattagatcccatttgtcaattttggcttttgttgccattgcttttagtgttttagtcatgaagtccttgcccatgcctatgtcctgaatggcattgcctaggttttcttctagggtttttatggttttaggtctaacatttaagtctttaatccatcttgagttaatttttgtattaggtgtaaggaagggatccagtttcagctttctacatatggctagccagttttcccagcaccatttgctaaatagggaatcctttccccatttcttgtttttgtcaggtttgtcaaagatcaggtggagcaaccccattttcatcactaactagctggtgaccttggataagtcactttatttctctgagtcttgggtttctcccatttaaaaggaggatgataatacctatatttagggctttcatgtaataaaataaggtaatttatgtgcagctccaagatcacgctgggcacgttacagatactcagtaaatggtggttattctgatgaggattgtgagccatggtgagaatcaagtgaaaggtggagaagggcagagctggtgggtcttgagtatggactaggaagatccatgaagtccagggtgtagggaggctcttggagaaggcaggacatgagcagtgcagggatgtgtaaaagcgtgaccagatgggatgaaatacccttttaggagaaggagaaaatagacccagaagcgaggtagagccaggcttgagaaaattacttcctctttctgagccttatttttcctcttggtaaagcgagtgtaacaatatctgccttgcaatgttgttatagcgattattgagatgttagaagtcaagctcccattaagatgcctggctcatgtaaggcatcaaatattagtttcattcctttcccaagagagggtactcacaaaatatcatcagggctagtaacacagaggataaatatttgaggggatggatacctcattctccatgatgtgattatgtcacattgcatacctatatcaaaacatctcatgtaccccataaatatatacaccgaatatgtaccccaaaaattaaaaataaacaatttttaaaaaaatcccccaaaacaaaaacaaatgaacaaacaaagacaaaatgtcagggctagagtgaccctcaacgcctttctatggtaacatacacatctattcatgaactgttcacacatcattcatcaatctatacagctatcacttatgcatttttcatatatccattcaaacaccaacaattcattcatcacccattgttcattcatctagccaaaagtccattcatccttcactcaccatctatccttatccatcatcatgcattcatcagcaaccttccatctgtctacctatcatctattctatattcatccttcatcaatctatttcatatccatacacccattcagccagctactcaagcagccatcattctttcatctgtctatccatttatcatttatccatcatccacctatccacctgccattagttagccatcaccatctctcatgaatttatttgttcctcaactatccattcttcatgcatctatccatctatttatcactcaatgatccatccatccattatttcattcatcatttatgcacccaccatttttcacgcatgaaatattcatccaaaatctattcttcatttcttcatagctatcatttacaagccaaacatcaacccaccaatttactcttcctcccttcctcttccatgcatcatccatccttcattcactctttcactaaacatctgtcatctattagccatgcctatcatcatctatgtatcttccatcgacataaccacctacgatctatgtaatttcatcatccatctgtatatgtttatccagtcattcattcatttatgtttcatcttccatattgcctgtcaggtaacatacaccagagatacagactaaataagctacaacctgtcctccagttgttcagagtctagtggagaaagataaataagcctatgatagctgctgtaccagaggaatgactgtaccaagcaccccaggggagaccacacaggagagagccacagactctgagggaactggggaaggactcacaaaggaggtggcagttcattaaactgggtctcgaagaatgattagaaggtccactgtttttttttttttttttttttttttgagacagagtctcactctgtcccccaggctggagtgcagtggcatgatcgtggctcactgcaacctctgccttccaggttcaagcaattctcgtgcctcagcctcccgagtagctaggactacaggtgcccgccaccaggcctggctaattttttgtatttttagtagagatggggttttaccgtgttggccaggctggtctcgaactcctgacctcaagtgatctgctcctgacctcaagtgatctgcgcgacttggcctcccaaagtgctgggattacaggcgtgagtgagccactgtgcccagcccaaaggtcccctggtatttttatggggggaaatgagtcctaagaggggaagtgactgtgcataatcatactaagagttaattaacaggacagagacttgtaaccaagtctctagcctactatactagttctgtttccacttcttatgggaaacagtaagttactcaagggaagacaagtaagcaaagaaaacctgcctcgaagcaccagaaggctgctgttttaggatctggttgtagatggggtggagaaggggattttcctagacctcagcttctcattcagggagaggtaacagcagaagccccaggaatatttgacaaagggcaggaaagaaggaggaggagagacagagcacagtgaggtgaggagaaaaacaggtcaggcacagtggggctcatacctgtaatcccagtgttttgagagatcgaggtgggaggatcacttgaggccaggacttggagaccagcctgggaaactccatctctaccaaaaaaaattaaccgggtgtggtagcatgtgcctgtagtcctggctgaggcaggaggatccccttgagcccaggagtttgaggctggctgcagtgagctaagatcgtgcctctgcactccagcctgggtgacagagcgagcccctgcttcaaaaggaaataatataataataaaaaaaccccacctactattttcttgttacctttacttgggtaattaataataatattgttactgcttggcacggtggcttatgccagcaatcccagcactttgggaggccgaggtgggtgggtcatttgaggtcgggagtttgagaccagcctggccaacatggtgaaaccgtctctactaaaaatatgcaaattaaccaggtatggttacacatgcctgtagtcctagctacttgggaggctgaggcaggagaatcacttgaatccaggaggtggaggttgcagcgagccgagatcatgccattgcactccagcctgggcaacagagcgagagtccatgtcaaaaataaaaataataataatgttgttaatattctagcagccatgttttattgagcacagactacgtgctgaacagtgtgctatagatttttcatgcatcataccattttatacctcaccctcagcagccccaagaagcagttattactcttgtccccattttgtgaatgaggaaactaagttcctgagaaggtaagctaggatttaaatatggtctgtgtgactacaaattccatgtcctttccactcctctttgctgcctctctcatcgttctttgggtatggtatataataagtgactcagacatacatgtgcattcactaagatatatgcttcattttactggagattttctctgtatcctcagactctgaaatagtggacatagtaggaaagaaaaaatttgttgaattttcatagctatcatttacaagccaaacatcaacccaccaagaaatatcttctatttcttgttgaattatcttgcaaagaaaatggataatcaattagaatatagggtatacaggtttgtctattctgacacaagtccaaagttttttgttttttttttttgagataagagtcttgctctgttgcccaggctggagtgagtgcaatggcacgatcttggctcactgcaacctccgcctcccaggttcaagcgattctcctgcctcagcctctcaagtagctgggattacagctgcctgccaccatgccagctattgtttttttgtatttttagtagagatggggtttcaccatattggccaggctggtctcgcacttctgacctcaagtgatctgcttgccttggcctcccaaagtgctgggattacagacgtgagccaccgtgcctgggcaaatctgaagtattaatagcataaagatataattatttttctcccaggtccaggagtaggctgggcatggtagctcatgcctgtggtcccggctacacaggaggctgaggtgggcggattgcttgagctcaggagttcgaggttgcagtgagctatgattgtgctgctgcactccagcctgggtgacagagggagatgctatctcaaaataataataataataatccaggacaagcttgtttgggtcccaggcttcttctgtcatgcagctctgccacccccagggtgttgccctagtccccgtggtctcagatgccacccacatatctacaccacaggcagtaggcagtggaaaaggcatgaggcaactatgacttgcaggttgctctccccacttctgttcacctaccactggtcagaatttagtcatgtgatagtaaccagctgcaagggaggctgggcaatgtagtctttattctgagaggctatgtgttcaggtaaaagtgagaggttttatttccacaggagaaggggaaaatgggtatgaggggcaagtaggggtctctggcgtagatgagaagaagatgtatggacaccaatattctctatcatgtgaagactcctagggtcacatatcatctctcccattagacagcaagctccctgagggcagggggctagattaatcaccctggtgtccctgaaagcttctagctcagacttaaggaagaagactttttcagtcccggatagaggtctaatgatctgatggaaccagagcaagtaggttagaggccttttgcctggtgacgaccaaagtggagaggccaggcgtctgggaggcggccagcaacagtagagagagacgcaggaaagcgacttgcaagggggctggagtgggtgaaaggtcagaggagagtctggaaaggaggatgcagtgttgcagggcgggcagagctgggggaaggaggggataatttagtaatcacagctcttccctcaatagaatgctcaagggctcacaaagcatcttggcctccatgttctcactggtgaggatagatggtacatgaagttaggtggcagatgggggggtgcttcggattgccaccagcccattcctatctagagaactgtcactggtttccttcttcgtttcccatgtgcttcctttctccttccctgtctcccttccttcttccttccttgatttctctcttcttcctctgtatgtgtggatatacacatgtataacacacacacacacatagacatacatatatatgtatatctgaatgtatgtctctgtatgtacagatatacacatatacatatatgtatatgtgcatacacatatgtgatgaccaaagtggagagggctaaaagatgaggccaggtgtctgggaggcagccagcaacagtagagagagacgcaggaaagcgacttgcaaggggactggaatgggtgaaaggtcagaaaagaagtgtgtatatgtgtgtatgtatatgtgtgtatatgtatatgtacatatatgtgtgtacatatgtatgtgtgtgtgtgtgtgtgtgtatgtataatcacctactatgtgccaggaggtattgtgaaagttattgagaaacacactggtgagcaaaccagacaagatccttgccctcatggagcttatgcttaagagagagagatattacacaaataaatgcacaaatagctccataaccgttaaatgtgaccaacgactagcgctatgcagaagtgcagaatgctgtgagagcatattcgttgtgtattccagcatttattaaacaaatatttaataaagcaaattatatgtattagagatttgcttttttttttttttttttttgagatggagtcttgctctgttgcccaggctggagtgcagtggcacgatcttggctcactgcaacctctgctgcccaggttcaagcgattctcctgcctcagcctcccgagtacctgggattacaggtatgtgccaccacgtctggctaattcttgttttttagtagagacggggtttcagcatcttggccaggctggtcttgaactcctgacttcgtgatccacctgtcttggcctcccaaagtgctgggattataggcatgagccactgcgcctggcctagagataatttttagaaaggaataaaatcacgctcttgttcaaatataaaatgaacatgtgtcaaagattttatttaactcattaatttatgaggtaaccaataaggtgttaaaaaatagttcaaaggagaatccaaagagaagaggcatacataggtaatgaggattgcttacattaatttgctaaagatgcaaaactgttttcttccaagagtactggggggaatgaattgcatctttattattattattttgagacagggtctctctctgttgccaaagggctagaatgcagtggtatgatcatggctcactgcagcctcaacctcctgggctcaagcgatcctcccacctcagcctcctgagtagttgggactatagacaagtgatatgtgacaccttgctagctaatttttaaataattttttgtagagatggggtttctctctgttgcccaggctggtctcaaactcctgggctcaagtgttcctgccacaggctcccaaagtgctgggattacaggcgcgagccaccgcatctggcctcaactgcatcttgagcagaagaaatttgtttgcatctctgtgacgagaattgtttttattatcatcaatcttgttacaacatattgaagtgtacgctagctcaaaaatgtgaaatgcgtcggcaaccatagaatcagctaacctgaaatgatgtaaagacaattcataccattctggaggacttccagtaatctttgtggacttttttttttcagcttcaaagtattttacagtttttcctgatgtgagtcagatcggtactagatactaataatacagaggtaaaccatacagacacaatttctccctcaaggacaatattcccttatgttctaactggggtggagagccggggaacagtttttggaagccaaactgagtctttgccatttatacagtcatatgttaattaacaacaggaatatgttctgagaaatgtgtcgtcaggtgatttcattcttgtgcaaacgtagaatgtactgtcacaattctagatggtacaacctactaggcacctagtctctattctataacctatttcttctaggttacaaatttgtacctcatgttactgtactgaatattgtaggcaattgtaacacaatggtaagtatttttgtatctaagcatagataaatatagaaaagatacagaaaaaatatgtagaaaagattttttttaaaaaagacacacttgtatctttactgtgaatggagcttgcaggactggaagttactcttggtgagttaggaagtggtgactggatgtgaaagtctaggacattactgcacactactgtagactttataaacactgtacacttaggctatactaaatttatttttaaaatttgtttctttcttcaatagttaactttagcttactgtaactgttttgttctataaacaaaaaaattttaaaaacactttttgtattattttgtaataacacttagcttaaaataggaacacattgtacagctgtataaaaacattttctttctttatatccttattctataagcctttttctacttttaaatgttttttccttaaattttgttgttgttgttgttaaaaactaagacacaaacacacacattagcttcagcctacacaaggtcaggatcatcaatatcactgtcttccacctccacgtttcgttccactggaaggttttcagggcagtaacacctgtggggctatcatatcctgtgacaacaataccttcttttgaatacctcctgaaaaacctacctgaggctgttttacagttaacttatttttttttaataagtagaaggagcacactgtaaaataacaattaaaaagtatagtaaacatgtaaatcaataagttgtttattgtcattatcaagtattatgtactgaacattttttttttttttttttgagatggagtttcgctctggttgcccaggctggagtgcaatggcacaatcttggctcactgcaacttctgtctcccaggttcaagcgattcttccgcctcagcctccggagtagctgggattacaggcatgcaccaccacgccgggctaattttgtatttttagtagagatgggcacaccaactaaagaacatcaaagcccagagcgagaaccttcctccctttcccattttccttcaacttgttattaaggagaaagtctctgttcaatgctggtgtgtttttaacacctctcttaacacttacttccctttttaacagagaataggcctccagagcctttggcaggccaccggatctggctagaatgtgatgacattgttttgttttcattgtacttatttttatggctaccttctatttatggcacgagatactggttttccatttagggagggccctaaactttccttttgacataatatatttatgtttttagaagaaggaccatttaaagaaaaaatattatgtaatattaattacataatatttgcagcacaggtggtactgagacagggaaaaaattataaagaggtatgtaatgtgctgaaaaggaggacatgcttctcaggctaatgcctctcccagcccctacttaacagaagggaccactgaggcacagagaggagaagggactttgtcaaggtcacactgatgatgtggactaagaactgacagcctcttgatagccctgtggtgggggatatcttgtgtcagatggggagggcagaggtcagggactgtgtgcagccccattggtcagtccagtgcactgatccgctagtcagacagagtcctccaaggttgaccaagtcatggactgaaggcaaaaaggaccgggggacctggaggggaggagagaagaatgctggtgtttatcacgcactaactatgctagatgctcgggtgccggacgtcacccctagggaattcacaaatttgggggcagacacgtcctacaaaaataactcaagtttctggcgaaagtgtggtaagtgttccagcagaggcctctctagtgacatctaggtttttgtctgctcactggtcatttccccatattcttttgggaaaccacctcttcaccactcttgattcttgtagctcagaccaggcaaaccccacacccacttcagaggtgggcacatgaccagacctggccaattagaacactttatccctcttgccacagagactggcacatggttgggcgcgtgacccaaggcaggccagagggggccttccccaggaatttgctggaactactggagaaaaatcccacttcatagggtttttaaaatggatacactgtaagccagagttgctggcagctatctttgccaccaaaagagagaggttctctgaaaatgaagctgacaggaaagcagggatgacagatggagagacagctagagtcctaatgctactgtatggtcacctcctggacccagccgtgaaatcagtgaccctgaacacagttctattttgctttgttacccaggctggagctttttatttttgtaattaaattaaattaaattaaattttaatttttagagacaaggtctcgctttatcacctagactggagtgcgtggtgcaatcacagctcactgcagaatcagcctcctaggctcaagtgatcctcctgcctcagcctcccatgtagttgggactacagttgtgtgccaccacgtctggctaatttttaatttttattattatttaatttaatttttaatttttattttttgtagacatgtggtctcactatgttacccaggctggtcttgaactcctggcctcaagtgatcctcctacctttatctcccaaagttctgggattccaggtgtgagccattgtgcctggctcgtttttatttttatagagatggggtctctctatgttgcccaggcttgaactcggttctagaaggcaataacacacacacacacacacacacacacatacatatttgcattagccactttgagatgggtttctgtctcttaaaaccaaaaagagacctgtctaattccaggcagaaacaatatcatgggaatgttggcaagggagagggattggagtgtgtgtaaagatttatctgggagtccttcctcgtggaggtaggttttgagcagggttttgagaaatggagaggattttgatatataaagaaggtgaagaaacagtatttccagggaggggaacatcctgggcaaaggcttggtggtggaagagggcagggaagtggcgccgtccagtgtgattggagagaggatggggatagagaggaggtgggagaagagctggcaagaagggatgtgccctaatcgtgcagagatccagtctgctccttcacctgcatcctcctcctctggaggcgtgcccttcatcagttaattcatccacagccatttactgaacaccagcatgcgtcaggcactgtcaaagggctggcgagagagctgtgggccacaccaccaagtccctgccctcttgtagcttcttttgtaggtgaaggacacaggtggtaaacatgagcaagaaataaacaagtatcatagtgtcagggagcagtaactgttatctagaaaaattaagacgagtaaagggaatacagactagtggagaggtgtttgggatgaaaacggataatactgatggttgaccgacatcgtgagtgcactcaatgccactgaactggtaaaatggttaaaatgataaattttacattaggtatttttctgttctttatattatgtacattttaccacaataaaaaacaggattggcagaggggtgctattttagctagggtggtcagggcatgtctctctaaggaggtgtcgtttgaacagaatggaggggaattagcaagccttgaagagattggggggaaggtattctgggtggagggaattgccaggacagatcctgtggggccagagtcggcctggtgtgttctaaggacagcaagtgggcccctgtggctggagcccagagagcaaagggagagggggaggaagatgagtacagggatcagcaggggcttgtatgccaggagagaactttggatttggttgtatgagtgatgggaagccatcggagggctgagcagggaagggatatgaatcagagtttctgttcaattctccctctgcccacactcagtcctgctcttaatcaggttggtaatcttgcctctgcttctgactatctctctctcctggctgctaccctcttctgcacatcttcatgaccactatcttgctgaggtcatcttttttttttttttttgagacagagtctcactctgtctcccagctgaagtgcagtggcacaatctcggctcgctacagcctctgcctcctgggttcaagtcattctcatgcctcagcctcccgagtagctgggattcaggcgagcaccaccatacccagttaatttttgtatttgtagtaacgatggggttttgccatgttggccaggctggtcttgaacacctggcctcaagtgatccacccaccttggcctcccaaagtgctgggattacaggtgtgaaccaccacacccagagaggtcattgtttttatatggctgacccaaatggcctccaactggcctccctgcctcctgccgacccagcctccaccagtcatcagggtctctttctacccgcagctctgaccagcccttgccttggtgagagccacagcctcccaacttccagtccagccccatctatcttcttttctcctcaccccaaagcccacacttagtcactcagagcctccatggggttcccctgctgcctgccgtaggcttgccctcctcaaggctggtgtatggctctctgctctactcgggttccttttcacctagacagccccctcccatccttcaacagcctcccagcatcactcctctgtgaagccttccttggctgtcccacccgcaggctggcttagctagctcctcttcagtgctccctaaaccactcacatcttccactttcagagccccgagcatgtggcatgcaaagcacattggtttggtttggttttgtacaaacctttccctttcctcagctccctgaaccccccagttccctgttcatagtatgttcgcaacaaatgtttattgaataaatgaatgagtttggaatttatcttgcagaaacaatactcccaccaccactaccagcacctccaccaacgaaaataatatccaacccaagttgatgacttgctatgcatcgggcactgtgctacacacttccaaatctggatctgatttctatttcataatattaggaggaaatcactgtgttagccccactttagagatgagaaaactgaggcatggtgaaattaatcaattttcctaaggctacataactcagaagcaggagagccgacagtccaaagtgtgcagcccaaagccgtgggcaccgcatgcagctggaggaggtgtcttggcattactgcatccacggacggggtttccaggagtcctggagttccatatgaagattgattgtccatgaactttttgggcatgggggcaggtccattacttgtattttttttttttttgacagggtcttgctttgttacccaggctggagtgcagtggtatggtcatagctcactgcagcctccatctcctgggttcgagagatcctctcacctcagcttcccaagtagctgggaccacaggcatgcatcaccatgtctgcattatatatatatatatatatttttttttttttttaagagatggtgtctccctgtgttgtgcaggctggtctcgaactcctgtgctcaagtgatcctcctgccttggcctcccaaagtgttgggagtacaggtgtgggccatcgtgcccagccgtgatccattactttttttttttttttttttgagacggagtcatgctctatcacccaggctggagtgtagtagtgagatctcggctcactgcaacttctgcctcctgggttcaagcgattcttctgcctcagcctcctgagtagctgggattacaggtgtgtgctacctcgcttgactaatttttgtttttttagtagagacagggtttcaccatgttgaccaggctggtctcgaactcctgacctcaagtgatccgcccacctcggcctcccaaagtgctgagattataggtgtgggccaccgcacccggctggtccattacttttaccagggtcttagaggggctcttgataattcctatatttaagatgctcctctgcacataagggggaaagatggagagttttcgagtattggactgttgcggttcaacctatgctttagagagatcacgttggctatccattgcagtgtaatgcagggagaagagattggaaatatccctaagattcaccaagagtggatgtgttaatcatatcatggtacctccttccacagaagggaataatacgcagccataaagatgaatgaggagtctctttatgtaccaatgtgaaatgattcctaagatatttatgtcagagagagagagacagggtctgggtctcactctgtctcccagactggagtgcagtagtgtgatctcggttcactacagcctccatctctgggggctcaagagatcctctcgcctcagcctcctcagtagctaggactacaggcttgcaccaccacgcttggctaattaaaataaaatttttttttggagagactaggtctcactatattgcccaggctggtctcaaacttctgggccaaagagattctcgcacctcagccttccaaagtgctgggattacaggcgtgagctaccctgcctggccttccaagacatagtttaagtaaatacagcaaggtgcaggccagcatgtataattagcttctatgtatgttttttaggaagggaggggttaagattatagatctagatgtgcttctatatgcataaaaaatctttggcaatattcactgttaaatagtcagtggaaaccctacctcatagggtttttatgagggttacatgagttaatattagataattgcttagaagagtacctggcacacattaagcactacagaagattttatttaataaaataaaaaagagtggcgggcgcctgtagtcccggttacttgggaggctgaggcaggggaatggcgtgaacccgggaggcggagcttgcagtgagatgagatcgcgccactgcactccagcctgggcgacagtgtgagactctgtctcaaaaaaaaaaaaaaaaaaaaaagagggtcccttaggggatggagaccaggtgactaaggggcagggagagagacttatttttcatctgaggccttagacgccttttgaatttggtaccatgggtaaattttttttatttttatttattaatttatttttgagacagagtctcactctgtcacccaggctggagtgcagtggcacgatctcggctcactgcaacctccacctcccgggttcaagtgattctcctgcctcagcctccctcgtagctgggattacagttgtgcgccaccacacctggctaatttttgtatttttagtagagttggattttcgccatgttggccagcctggtctcgaactcttgacatcagatgatctgcctgcctcagccttccaaagtgctacgatgacaggcgtgagccaccacgcccggcctatttttttgaagttgaaattcagtgtatcttggccaggcgtggtggctcatgctgtaaccctagcactttgggaagctgaggcaggtggattgcttgagctcaggagtttgagagcagcctgggcaacatagtgagaccctatctctcaaaaaaatgcaaaaattagctgggtgtagtggcgtgcacctgtagtcccagctacttggggggctgaggtgggaggattgcttgagcccaggaggcataggttgcagtgagccgagctcacaccactgcactccagcctggacgacggtgagaccctgtctcaaaaaagaaaacaaaaaacaaaaaacaaaaaaaaaaaaagagaaagaaagaaattcagcatatctagatagctaagagatcatctgagggggtcagggcctggaaggagatcccacccagaatccccgggaattcgctgtaattggtcaaaggccacattgtgtagtgtgagaaatcaggacgtgaggaaaaggcggacaggagacaccaaaacacccacgccccagggcccactataaaaagcacatttaaaaacaccagactggaaaagttttattattattattattattttttaaatagcaaaagcgagtccccccaggaggcgcactgcagctgcggctgtggcggttcccaggtgatgtcagtcctggccaggcgccagtcccggccccttggagacggtcttggtgggttcagcttgactgtttttccttcctgagacttgaggacaccttcctgtctcaaagaaggaagcctttccagggctttctgaaagccaggggcaggggaggcggtgggcctgggctgcaagggcagagagaggcagggaaggtgggtgggggtggggaggagcgggggctgcctctgggaggagagtgagggtggagagagcagaagacaagcctggctcctgggtggctctttagccctcccacccgggggcgcgagggggtctgcttcttgggaatccaaggcccgcctccctggccccattgcttctcagccctggctgcttcctggggaggcccctgggtggggtgaggttgtggggtgagagaggttcccacagagttcccagttggtcagtgtcttttctccctccctgagccctgggcccaccctttcttctctatggttaaaggctctttgccaatatcttccaggccaagcgcggtggctcacgcctgtaatcccagcacttcgggaggctgcagcaggcagatctcctgaggtcagaagtttgaggccagcctggtcaatatggtgaaaccctgtctctactaaaaatacaaaaattagccaggtgtggtggcacgctcctgaatcccagctactctggaggccgaggcaggagaatcgcttgaacctgggagacggaggttgcagtgagtcgaatcatgccactgcactccagcctgggtgatggagcgagactctgtctgaaaacaaaaacaaaaacaaaaacaaaacaaaacaaaacaaaacacccaagattctgccaatatcttccaaactgggttttctgcagatgggacgatccacagagctgggtttgaggtccaactctgcactcctagccgtgcgacctcaggctggtcactgcttttctttgagtgccacctctgaaatggattaggttggccttacagggtggttatgcagagtgagtgagacagaacaatgcctcttggtccttcccgagtatctgctaggcacccacaacgcgccggtgccaccaggcgctcgggatgctcagcatttggcacagaggcagcagagcagggaggtgaagagagtgggctctggacccagcctcagtccacatcccggttctgtcctttgatggccgtgtgaggatagtgacagcctgtctcactgggtcgtagaggagtaaatgagttacaggccgtggaacagtgcctggcactgaggcggtgctaggtaagtgtttgcttttattttcgacttctgtccaaccagccttctgttgctttgacagcttcatggggctgctctgggcactcaaaggagatatgttggggattcaggggttgtgtttaggggagacccaggtcctgcaggtgccccatcattcatactgatgcaggggtggcctggaagctgcagaaccattcacactcggcaaagccttctctcaccttggaagcatcattcctaatgacgacacaggtctcccagccatgcgttcccacataacttagaagcacccatcccatttttattatttgctcagagcctgctttttcagtaggccgtaaactccatgaggtcaggtactacatctggcttattctctgatcatccctagagccttgtgtggttcatggagaagttcaaaacatgtttgttgacggacttactgactgacaaagtctgccagccttatgttggtctacaatgttacactctatcccatgcctcctgctgagttttaccctcctgctgtgatgcaggctgtgggatctggagctagaccccctcagttggaatcctggctgtgccattgcctagctgggtgcccttgggcttggttttctagtctgtgaaatggggatagcaacagtacctacctatgtggcttgttgcaagtgaggccatctctgtatgtcactcagagaagtgccttggattagtcagttccatcaacatcaggactaggcacgcacctggtgaggtcatgtgggggtggtggttgagagcccagtggggctctgcagctagaacatctgattcaaatccaccagccactgtgtcaccttggccaagttctttaacctccttgtgcctccgtttcctcatctataaaatggagcaataataatacatatctaaccagcttttgagcaagctgtatgtatgtatgtatttatttatttagagacggggtcttactctattgcccaggctggagtgcagtggtgcaatctcggctcactgcaacctccaactcctgggttgaagggattttcctgcctcggcctcctgagtagctgggattacaggcacgcaccaccatgcccagctaatttttgtatttttagcagagatggggtttggccatgttggccaggctggtcttgaactcctggcctcaagtgatctgccctcctccgccttccaaagcactgtgattacaggcatgagccactgccccccgcgaagctgtatttattttatgtaaagtgcatagcctaggcctgacacgtagtaggtcctcaaaagagtcaggcatttttccaagccattcagaaaaaaacaactcctagattttatcagccttccctcccacaaggccagtgtgtcccagctgacaaagttgctggccgtgctgacgtgaggaaaagcaagggccagagagggccagacgcctaccctgggtcacacaggagcagtggccaacctagaataggctaggtcttctgtctcgcagcctgttcatcctgagtgcctccctggtttccaggccctgctggcctgccctctgaccctagccccctgggagctctatcccaggcccatggggtctgcaaatctggtctggattagacacgctgagaagcaaacgccagcccccccagccggctgcccagtgggacctgtgctcacagctgctgaggctcatagggacataaatcatggtggcaggagactcgggggatgggaccaccttagcctcctaaggggcacaggggcctgagagtcacgagcagaggcacctgggtctgctggggatattttccatcgtctgttggacaagctaaagccagggtgcatcagagggggccaggacaccatttggcagccctcgcatcacagtaggccaagatcccaacttctttttaacttttcattttgcaatcatttacaacatgcagaaaagtgacaaaagtggtgcagagaactcccatataccctgtactcagattcaccacattttaagtttgtcatatttactctatccttttctctcacacatatattatttctcttctgaaccatttgagagagcacgttacctacatcatacttctccttaatagtacttcaggatgtatttttttttttttttttgagacggagtctcactctgtcacccaggctggagtgcaatggtgcgatcttggctcactgcaacctctgcctcccgggttcgagcagttctcctgcctcagcctcccgagtagctgggattacaggcgcctgccaccacagggtttcaccatgttggccaggctggtctcgaactcctgacctcaggtgatgcgcccacctcggcctcccaaagtgctgggattacaagctgagccaccacgcccggcctaggatgtaattcttaagcacaaggatatcctctgacacaatcagggtgctgttagcaaatacagaaaatttaactttgatgcaataccttaatctattgttcatatcccaattttgtgtgaccatgtctcaaaaaaaaaaattgtcaactctaccaagaaggtcccctgtcacattttcccctctgcagtacaggatccagttcaaagtcatgtatcgcatttacctgttcaggtctatacttgatatcacaactacacgaggtaaaatatacagtcgtaagagacacagatggggttgaacaaagacatccaacttcatatgtacgtcccatgaaccaatgtttctataaatcctctaattatatggtgttccacaataatgcatcacgctcctgactgtgtggaggtagttaagagttaacttgccaggccaggcacagtggctcacacctgtaatcccagcactttgggaggctgaggctggaggattgcttgagcccaggaatttgagactagcctgggcaacatggcgaaaccccctcaaaataaaaaattagctgggcatcatggtgcacacctgtagtcccagctactcaggaggctgaggcgctaggactacctgactccaggaggtggaggctgcagtgagccatgatcgtgccacctgcactccagcctgggtgacagggtgtaaccgtgtctcaaagaaaaaaaaaagttaacttaccaaatatgccatagtcttcagcactctctttttgtagtgcttcattttttaacctaataaaagcctcataaaatgggagtggcctgggacaatgaggggaacctgaagtgctgtgggtgcaagaggtcctgtgttctcagccctgctcagctccagatgctgtgcaaccgtggcccatcaccgctcctctctgagcttcaggttgccatgggtgacctctgaggccttcctgctcataactgtggagtcagagaaaacagccctgcatggcaaggagggagatttgtgttcttggtgtcccaacagggccaaggacctgctggggaaccccaggcaggttgccctctgtcttgtctcactttcttcattgtgaaatgatgaactctgagattattcttgtgctgctgcttcatgtgtcaagacttgcagggagagtgtaaccctttggggtccaaggtggcctggctgagtcggtcattccaaccccttcagtcctggatttcttctccctgagcagctttactcctgtggcctcaagttggcctggagaagcttggctgggctggaccatcccggaggcgacaggcatgctgggggagcggacaatgttacaaaatgttccccagaggagctgcctatatatgcagaccacacctgtgcttctccccggtcacgtgtgtgggctgaccttgcagctcacaaaggctcatgggcattaactgtccattaccaggaagatagcaagctgcaaaatatgcataatggagcactatgcagctatgaaaaggtgtgaaacagctctgtaagcaaccaagggtctccaagaagtacagttaagaaaaaaaaatccagtgcagagaggagtgtgtgaaatgctaccacttgtgtggaaaaacaatatctatgtaatttgcctatatatgcagaccatctctgccggaatccataggatcctggttaccttaacatagcaattgcctctggggactggagctggtggctgggagagaaggagacttattgtcagtttattcttttttgtgtctcattcaaaggaaagaaccggtatgtgtagatgtgcaagaggggctggctcctgggaagctgctaattgcatttcttgatctccatgctgggtgtacaggtgtgctcagcttgtgaaaatccattgagctgtacccttacaccctgtgcactttcctgaatgtgtcttatacttccataaaaagtgtaaacttggccgggcgcagtaactcatgcctgtaatcccagcactttgggaggccaacatgggtgggtcacctgaggtcaggagttcgagaccagccttgccaacatggtgaaaccccgtctttactaaaaatacaaaaattagccaggcgtggtggtgcacgtctgtactcccagctactcaggaggctgaggcaggagaatcgcttgaacccgggaggtggaggttgcagtgagccaagatcacgccactgcactccaacctgggtgacagagtgagatccatcttaaaaaaaaaaaaaaagcgtaaacttagcatggtttaaatgatttgttaagcgtatgtgtgctagtttaacaaaaacgctgcagagctgggcgcagtggctcatgcctataatcccagcactttgggaggctgaggtggatcgcttgagcccaggagctggagaccagcctgcataacatagtaagaacctgtctctacaaaataaacaaataaataaaattagccaggcctggtggtgtatgcccgtatttccagctactccgcaggctgaggtgggaggatcacttgaggacaggaggttaagcctgcagcgagctatgactgtgccactgcactccagcctgggtgacagagtgagaccctatctcaaacaaaacaacaaaaaatactcggtgggattatcgtcttcactgtggctgtctctgggataagtgatatttctagagtcttatagcattttgaatttgttttacaatgaaagcacaggcagagaaacctataaatattttttcagaaacagttatcagtatagaagcttttttggaaggacactcaggaagctgcctctggggaggggcctgaggaggtctgtacttttcactgcataccatttgatacaacttggattacttaccagtgcatacagggtctattaaaaactatctcacaaagcaaaacaaatacttatctttctgttctagctgctcttactagttagagactgagccagggaggcccagaggggtcaagcaacatctctggggtcacccagcaaatctggtggcggagtgggcctccagccagagcacccaagtgtctgctctgcccccactcccaggcttcctgccattgacaaggccacagtccttttcctgtggctttgccagaggctggctgtacctgggagggtaggcgcagggggagcaatgtgctttcctaatcagctcccaaagggggaagcacagccacgctgggacacaggataagcacgaccagtgttcctgaaacagcggggaagtgaggtagagggtgcttggaaagctctcctgggtgggggaccccggccccctggggccctccttcctctacttcttacaccaaaggaattaagcatggtaatttcatggcctgctccagcctagggactggcaattccacaactcccttgatctccctgggcctcggttttcatctgtgaggaagaccaggttggtcgggctcattcctgtggcatctggcacagtgcctgccacacagagggtattgacaatctgtttgtcaatttgcaaaatcggagccacaattcaggctcagatggtcaaacgcaggggagtggggtagaggcagaacagaggggatacgaacgtggactctggggccagagtgcagtcagtaaacatgaaatagatcacttgagctcaggagtttgagaccagcctgggcaacatagtgagaccctgtctctaaaaaaataaaaataaaagtgtttgttaaataaataaactgttgaaataggcatatgaatgtaccttgctgaggagagggtggctgcctggctgccctggcctttccctggctctcccaccctcgggcctctcgagcttctctgatcctgacctcacagggacacagccccagcccgagagccaagaactcctagctgcactgatcagctgacgcatcgctgtctctgctgggtctgcagtggggaagacaccagctctcacctcccagggctcctgggagtgtaattggggtaacaggtgctggctttccacttggggcatctccagggcaaggaaggagctgctctgggcttcaaaggtggacggacctcagggtgtcaccctgccacgtgcctctgggtgtcatcggtcttctaaagcatttcagctaacacaggggtaagaatattcccctttagcatgcactcatttgcacttgtggaaaaccacatggcttgttggtgatcgcatcaaagagggatgggttaaaggatggcatgttcacaaaatggaataataagcagctcaggaagaaatgaaataccctttaggtactgacttgggatgataccaagctagattaaggaaaaaaagaaggagccaaaagtgtgtacgatgtgctgtcatttgtgtatttgcctgatcattcatagtgaatgggacatcacaggaaactggtgccctaggctgcttgcagagaggagagctggtggctggaggacaggggcacggagacttttcaacacataccctctggtaccttctgagttttgaaccatgtgaatgaaatgaacacaggccttattcaaaaataagtaaaattaagatttctttaccaaccatatcagacacctaacagttgttaagaacatctgataaacagcagactgaggaaagtttggttatggcgcccggagagggggctctgcctgccttcccccgccccacccccacccttccagggctcagggcagcccccagaacatctgtgcctctctctaggtccaggggagggcccacctctgacctccgatgtccacgggactctcctcagctcagaacgacgtcttttatttaaaaatagcttttattttaaactcaccaattctctctcacacacactcacactcacgcacagatacacacacaccctgtcaccaacagtctttgtttttccaaaagttctgccttgtctctgaccagccagagctgggcaggctgaatggatcctcacagctctccaggatcgggtggagatgtcccgagggccctgcccagagtgtcccggaacaggccatggtcccccggtccctacacaaagaaggggtgggcttggctcctggggtcttcttccctgtccagccagtggctggctcctggcctccttctccagggtccaggctcatctccgtggccctcgaaggggggccacccccctcaccttcaagcagctgccccccaggtcacgacggccaccctgcagagggggagaaagagtataaagaggttcgattaggccagtgtgaacactggaactaacctctgtatccctcaagagggatcctgatcaataaatcacagttcagccacacgatcaagttctctgcaacagaaagcagaagaaaccctttctggactgatacagactgctgccaaatgacaatgtttagggacaaaagcaaggggcaggctgaatgcgcctgtgtgctgtgattgctggggagaagcacacacgggaaattgtgagtgggtttcttcagagaggaatttgatgatggagagaggatgggagggaggctctctcatgctatactgttttttgagatggagtcttgctctgttgccaggctggaatgcagtggcacaatctcagctcactgcaacctctgcctcccgggttcaagtgattctcctgcctcatcctcccgagtagcggggactacaggggcccaccgccacacccggctaatttttgtattcacgctatacttttttaccttttctacttctttcccatatgatctgttgcttaaaaaaaatccaatatattttaaagcataatattttacacgggcaaaacaagcacaccccacagtggtcctccccctgcctgactgcatgcctagcggctcactcgtccacctttaaaaggggactcggtttctggcctccttgacttccctcagggcgtcccctttcccaggaatgtgctctcaggtcttgtctccctggaaaggtttctctgttcctgaaattgcctagcacttcctgcctttctggggacattccatggggatgaatctcagaaggacaaggcagggtctctcctttgtctccccatctggactgggatctcagggagtggtagggaaaaggagttcttcactctgtggtcccatttccagcctgggctctcttggcccaggacctgacttggagcaggcaccaatcaaggccgcctgaattaagtggcagccattggaagatgggctaatggcggcagtccctgaaaccatcagtccttacaggggctgtctctaccagctcttctcattgatattttcagactggacacatgggtttcatcctcaccgtaagccagagaggtcacagatgttaaagcaccccctcttttgaggcctccagccactgaatgactggcccagaggcacccagccagttgtaaaagagctgggctagaaatctatgttgtccaacaatctgtcctgtttccaggacatgatagtgtctgaaatcccactgtaaatgctcatcaccctgagcctggctagatgatggaggaacaggcagctttctcagcccacttagagaaacagctgaccatctgggagctctgtcccctgccccctccacccccaggtccaggttggggcagatccatccagatgcgagcccagcctccctcgaggctcttgcagcccagggacagcatgttcactcacaggcagggctattttgagggctgaggccacagtcccagcagagcctggggcttgggcttctcagacaaactctggcaggagtggctgagaagggcagataggggagggggtgcaatattaaggttgaattagaaaactggccttcctctcttttactctgtaagtgctcagggacagggagagccgccccctcccaccccaagtctggaggtcagctggagacctagggtcccagaagaatgctgggactgttcacctccctgaacctcagtttcttcatctatgaaatggggacaaaatgattttacttgccatctcaaggtgcagtcgaatgtgaatgcagctgtgtaagctgctaagtgtacttagaagaggtcttgacggccgggtatggtggcttatgcctgtaatcccagcacttttgggaggccgaggcaggcggatcacctgaggccaggagttcgagaccagcctggccaacatggcaaaaccccgtctctactaaaaatacaaaaaattagccaggtgtggtggctggcacctgtaatcccagctacttgggaggctggggcaggagaactgcttgaacccgggaggcggaggctgcagtgagttgagatcgtgccactgtactccagcctgggcgacagagcgagactccatcgcaaaaaaaaaaaaaaaaaagtcctgacaagaccccagtttgtttgtcccttaggaactcagcaccaagggtcttcgggaagcaccatggttaggagttaggctcaagtgagacagacctaggcttcgatccctactttgccaagggccaactactggacctcaggcaagtgatttcatctcactgagcctcagtttcccccccgtaaaggggaattactttacaggatcacacaagctaatctaggtaaagccttggcacagtgttgggaacaaagtaaatgttcaataaatgttcataagtattattatcagcatcatctatggacagtgcctcctggtcccagctaccctctgggtataccaacaggggagagccttacaagatgatcctgtccaatcctcacccccaggtgacaaagggaaaacagggcagagacaagaaccccctttccacctcccacgtgctaattctaccacagagggccacacctaacccctccttcaacagaaagatgctacaggaaactgtttccacggcaaccccaactccagactggccaggatgggagggaggtggtggctcagggtaaaggaacggggtcttgggtcttaaagctcttctggcccacaaagctcagaagggagcaagagctccccaagccagccagttttcttccagcagagtcttcaaggggccatagctggccaggattgcccctctcgcctattcccagaggagaccgtggggttgagagcatggtttctacagccaaatttggctgagttcttggtcccatagacagatcccagggaagcggccaggcccaggggaggcccctgtgagctgtgggacaggcctgagacctgcagagaagtcccccagcctgcttgctatgggggtggacacatgacagttacagggacttccctctgtaacctatcccacgtcccaaccaggcaggcctgagtttgaatcctggttccatcactgactgtgtgtctctgcgccactggcagcacctctaagcaagtggggataaccacagcgcctcattcctggctgttgcaggattttaatgataaatcataaagagcgcttagcacagatcagtgctcatgaaggctgctgtcactgctgttattggccattgtgctccccctctgcactcctgccacttttaacctcttccctcttccttctctaggcctgagctcttgctgtatgccccaatcctagaacaccctttcctaccccttcatcggcctgcccctgttctaaagcatccttcagaaatgagacacagaaaccctgtcagcactcaccctgggttggaggctttctctgggctctgagaatccctttgtgcttcccctcccccaccatcagaccacagcatcctcatcttcatctccctgccctgaccctggggctgtactgtcaggtcctgactggtggaagggtggggacctacaacctgcttctctggggttctcagagccaacagaaggcagctgttgggtagctaagggttgctaactggaatgaatgggtgaaaggcagtcagggagtatccctgagagccccttcaggccctcccatcccaggaagccttaaaggcccactcctggcttctcagcccagcctggggcactgacaggggcccacagctgggagcagcagggaccctggagagggcacaagcctgaggctaagaagaccgacgattcagggcaactgaggcagccaagtgttgagcaaccaggctggatatctgatgagccagacagagggtggtctcaggccaagatgcagaggcctccgcagaacagggtggagcaagggaccaacggcagctgtgagaaccaaacagcagggagtcaggggcctaactccaattccccatgcccttccacttggccaccaaaagtcagtactctctcagcctcagtttccccggatgtaaatggtagctgctggaatacaagttgttagacaggcttctttactgtaggaaaagcccaggccagaaaggcacacggtcgggggatgaagcaggttccttggagcctgggcaaggtttcagccaagaggccacctctgctgccacacagcccccgcccacccctaccagcctgatccactttcttgcccaggacacattgcaggagctgcacaccagctccctccagctgacccaagagtgccctctcccaacaccacgtccttttgggggctggggactctcagagggccccttcttcactcctactgctcatccgctgggtacctcaggctctcggttggcggtttgtggcctcctttcttctcagtctcctgctcttgggttagatcttaggacaggggacaattatttcaaggtgggggcaacacacaccgggcaagcccagggccagcgccccggcttcccagctgagtaaatgtgggcaggtgatcccatctctgatgctcagatcctcatcaggataaaatgggcagaaaaactacctgcctgaagggattcttgtgaaggcaaaaaagtggatgtggagcgcatcggcacagaggaagactccataaaagatgggtctttgttactcagtcctcatgccgtcttcccagcaggaaggaagttccagcacacctttcgttggaggggatatcccacactgagcagttaaatcagacccgaactctgggttttcccgcatccttctgtttgggggcctgggcattaagtcagtggttctgggcttggggtgccgcacccagcacgaattccacgtcgcttccccctggcctcgttggggacccctgcacctctccggttcccgcagaggcgctgccccccgcctaccccgacctggcggccgcagcgagggacgcagcacactcacccccttgcgctggttgctgaggcagaaggtgcagatggagcgcggctggcggccgccgtcggcggcggcggggacggcgcccttggcactgcccgcggcacggaagcacggctgcccgtcgtcggccgagtcgcccagcagcagcacgttggccaggtgcgcgatgtagctggacgccaggcgcacggtctcgatcttggacagcttgcggtccaccggctcggtggggatgagcgtgcgcagcgccgtgaaggccgtgttcacgctctgagtgcggtcccgctcccgcgcgttggccgcctgccgctgtcgcaccaccaccacggggcccgcgccgccgccgccgcccgcccgccgcccgcccccggggcccgggccgcgccgcgccgcctccgggccctcgcagcagccgaacgactggtccgacgcgtcgctctcgctgcggttctcctcgtcctcgctcagcagccgcacgtccgggtacagcacgtgcgcgccgacgggccgcagcagcgcgaacgccatgggcgccggccgcgtccctccgtgcgccgcgtcccagcgtcggccgcgccccgccgtgcgctcccgcgcgctcccacggccccgccggcccccgccttataggcgagggaggggccaatggcaaggccgccccggccgggggcggagggctccgcccggccaatggggaggcgtccgcccggccaatggggaggcgtccgccgcgccctggccaatggcgacgctcccaccgcctccgtcccccaggttgaaagcggcccgggagccggcggcccaccccgaaggcccccgttcccggctggctagcccggcagatgctggaggtctgggagggtcggccggggtgggcccagatccgaactttttgtctccagcctggaccacctgggagacgcgggcagatccctttctcctctctgggcctcagtttcctcgttcggaacgttcagattgcagagaaacagctagtgtctgcctgccctccaattctaatcctgtagttctgcagctttcacgtgcgtaagaactggggaaggggcttttgctattacagagtcccaaattgctcccattctgattgagcagttctggaacgggcccaggaacctacattttgtaacaagccattggtgatagtggtggtgtccgtggagaacacttggagaaaagctataatctttccaaatgaggattcgacagtgtcttgtccctgaagacaaacttaaaaagaagaagaaaaaaaaaagcaaaacaaaaccacaatacacaaacaccagtagttcgttcgttttttcaacaaatattcgttgggtccctactatgtgtcagacatggttttaggtctgaggatacagccattaacaaaataaattcttcaccctcacggaactgacgttttggttaaggaactactgtgtaccagactcggtgctatatactctattgcgcccagctgaggctgcaggatggcagccctgagttacaggtcagagagctccggccttcagtcgtacaggtgggagtggcggcgctagctccagcctgtccggtttcactacctcttggaatcctaccaccaccatcccatcacacacacacgggctatctttcctcaatgcctgcttgccttctagaaaccttagattgttcagcctgacgtgtcctcttcagagaattgctgagccaaaggtggttgccggggtctcgatctcactcgtgcctgctgctcagctctctccaggcactagctaaaccagcatccacttggccttgaaaataagcccgagtggcagccggtgtagcagacagagcgcagggagtggagttgaaaggcttctaggtgcattttggctcctctgggcgtctgttttcctgacgatgcctgcagctctgccatgctgtgctttcctggcttccctgatccaggccagaattaggggaagaagagggagcgagggatttcccatgactgccgggggaggagccccttaggacccagggtctgcgggagagtctgttcccacacctggatccccccaccgccagcatttgaccgtgaccccagccaggctgggctttggggaggagggaaacagccagcatgggccccctccccgcagggctggtcccacacacagccccagaccaggctgctgcttcctgagccgatgaattattaccgggagatttccttccctgtctgcgcctcctcacaggggctcccagctcacttcactttcgctttctcccccttctccccctcctctctgcttctgaccctcaggcagcttgaaattcctctgtccagccccctcccaattccacctccaactggagatgccaaccaaggcgtgaactgggcccggaaggcgaagaggggcttgccttgtaggctcattcatttatttgctccttaggcatattttgacacttgggaccctgggagtagaagaaaaccatgaatgagactgagacaggccttctgcagccgagaggggaaggcgagctgtaaacaaaggatttcaagacaatgtggtaggagcaagccagggtctggtatcagagagacccagttccggttccaaggttagctgcttcccagagtctcagttgcctgctctgaaaatgagataataatagtacccattcccagggctggtgatggttccatgagtttgtgccagtagagctgggcttggcacacaggagtgctcagtacctgagaggagtttgtgctactgtttttaggggctggccccagccaactgcctgggaaagggctgagcagcattgacttttctaggtcttgtccctgggagtgcggaggggactcctaccacattctcagctcacctacacaggggacctcagcttcccccattctctgtccctcactctgctccagccacactggcctccccactaaatctggagcccacttcttcctggcccccctggcccctgatagtctcatagtttgttcactcatttccttcaaatcttcactcaaatcttatctcagggaggcccttcctgaccaccagcactaacagtaatggcttctccaacctgccagcacccccagctctccctttccccttatcctgctttatttctttttatagcatttgtcactgactttcattcattcacttattcattctacaaatattaactgagcacctgctatgtgctaggcacagttctgggtactgcggatacagcagtagagacattacatatttatttgtctaccacctgtctccctccactagagtataagctccatggggcaggtactttgtgtattttgctcatctcacttccttcccaacacaaccttctgaggtaggtattgtcattattcccattttacagatgaagatacggaggttcaaagaggggaaagtgacttgcccgaggtcacacggtgggccaatgtgggagctgagattggtctgactccaaagccattgctccttccctaaccacatggcttctgaggcagcctagaggcctgtgagggctgagtaggagtctgccaggtaagaggagacaggtgtcacaggctgagagggtagaggctggtccctgcctccctgaccatgggcacccttcacttctacaaaaagcatttgtttctcagaggcacctgctgtgcacaactctgagcctgtgctccagctgtccttcctgcttggaatgctgcccctttgggtctgaccagacatccctagtcctctgccagtgttcagagtagcagatggtgaaggcctctttgccactttttgccaaccttgctgcaaagtcttgttgtgttcatcacaccatattttgacttttctcccttcatccctgattctcacttccatttccctcccctaacagggcacccactcccatatctttgacgcatgcctttggatatatgtgtgtctttataaaatgtgcatggcgttgatttgtgtgtggaggtttttaatgtatataaatagtggtttcaatagatctgtgtcataggctattttgtttcctcgacactgctctgtgtgctgagtccagctcaagtcccttggttcccactgctgctaagcatgcacggtgtgcgtgtgccaccatgcctccttttcccaccgctttagtgatggatgctggctacctccagttcccacctccccaagcaaagctgtgatggacttgcagtgtgtgactctcatggactcccgtgtgtatttctctgggatgtacactcgggggcaggatccctggggtggagagaatacatacagttactgcactctatgacggctgcctcagtctacatgcccagcagcagggcatgagggaccactttctccacatgcaccctagcacttggaattatctgacttcccaatgatggagatatgggttgttttccatctccttgtgcttgcctccatcacggtgtgggcaataatgaatacttgttgcactttgggtggccgaggcgggtggatcattgaggtcaggagtctgagaccatcctggccaacatggagaaaccccgtctctagtgaaaatacaaaaattagccaggcgtggtggtgtacctgtaatcccagctactcaggaggctgagtcaggagaatcgcttgaacctgggaggcagaggttgcagtgagccgagatcgcgccactgcactccagcctgggtgacagagcaagactccatctctctctctctctctctctctctatatatatatatatatatatacatatatatatgtatatatatgtatatatatgtgtatatatgtgtatatatatgtatatatgtgtatatatatatgtatatatatatataatgaatacttgttgaacaaatgaatgaaaaggctaatacacagcctcccacacctaccttgtaccaaacctcagtctagaaggtggcggtatatgtgtgtatgtttgtgtgtagagaggggaatataagacaaagtcttatgcctcaacctgcttagagaaaaagactaatgacagttagcatttattgagggcttactttgtgtcaagaattcataggtgtatattcacaaccttaacttcagtgagacaagtaaaatgcatttctctctcattcaaggcctttggaggtagggctgctctggcattccacagtgtggtcgccagcttccaagattgccagcaatgatccttgcctcctagtattcatctgcgtgtgtagaaccctcccccattgaatcagatttgactcatgtgaccaaaagaatatgacagaagtgacggtatgtgacttctgaatgtagctcataaaggcattgagctcctgccttgttctcttgagtcatttactctggggacagcagccaccatgccatgaggacactcaagccgtctgtggagagagaccaaggtccctagcctacagccatcaccaatttgccagccaagtgagtgagcctccttggatgtggatcctgaattcctgacctgcaggacctgtgaaaaagaagaaagataatacagaaagacaaagaaaaaagataataaataattattggctgggcgcagtggctcacacctgtaatcccaggacttcacaaggctgaggccaaaggatcgtttgaggccaggagtttgagaccagcctgggtaacatagtgagaccctgtctctaaaagaaaaaaaaggaaaagaaatttgctggatgctctggtgcatgcctgtgttcccagctactctggaggctgaggcaggagggtcgcttgagcccaggagtttgaggctgcagtgagccatgatcacaccactgcactccagcctgggcaacagagcaagaccttgtctctaaaaacacaaaaattatcaatgttgtaatcccgtaagtttagggtgttttgttatgcaacattagataactaaaacagatggtgccggggacccaggctctgtctatctttttactgcaccatacatagctttcacttcctagttctcttacagagccacatggccacaggagccattctatctgcattccaactggcaaaaaggagaaagaggcagaaggaagagcatgctttaatctgtagaacaccaacctcactccgttcacatcccgttggcaagatcttgtcatttgaccatacttaactgaaaaggaggctgagtatatagtcttttgcaggtaggtgtccgtgtgtgcagctgaacactgggtttctgttagtgaggaagaagggaagaatggctattgaaaacaactaaccataggtgttatataccataggtgttaactctggagataataatgtcacatggttaagtttgcacatttgggagcctgactgcctggtttcagttctcagttaggccacttaccagatgtgtgatcttgggaaatttaccaaacttttctgggcctcagtttcctcatctgtaaacagggctcacagtaaagcctgcctcatagggttgttatgaggattaaatgagtcaatgtatgtagcgtttataacagtcctggcacatggtatgtgctgtgtgttagctgttttcattatataatccttacaagggtttttttttttttttgacagagtttcacaattattgcccaggctggagtgcaatggtgcgatcgcagctcactgcaacctctgcctcccaggaggattctcctgcctcagcttcccatgtagctgggattacaggcatgcaccagcatgcctggctgattttgtatttttagtagagactgggtttcaccacattggtcaggctggtcttgaactcctgacctcaagtgatccaccctctttggcctcgtaaagtgctgggattacaggcatgagccaccgcgcctggccacaaggggttttcttaagttctcacaaccagcaagtgatggaagcagaatttggcccaaaagcatttttttccacttgcgtcatcccatagaaattcgtagagtgcaagatcaagacccagatcagtacaccgcacataatacgcatccagaaatatctgtcgaatgagtgagttaaataaacacgtaaactgtccttacatagagatgctaggttttgtttggttttgttttatgttcagttaatgagaatgctccattgaccccatctggttcctctagtatggggctgatgcccttgataccatgctagaactcagtccctccagggtccctccaagccatcatttttaagggtgaattcctgggaacacttgttcttgcggatgctcaggattccatgattttttttaaaaaaagtcagagaagctgcattttatatccccctcctagcgacctgcaacaacattagcatgttaaagagtcggagaaatcctgcaacaaaaaagcttgttgggcttcatttcaatctgcattttgttttcttatttttttgagacgaggtcttactctgttgcccaggctggagtatagtgatgcaatcatggttcactgcagcctcgacctcccaggctcaagcaatcctcccacctcagcctcccaaataactaggactacaggcatgtgacaaacccagttaatttttaatttttttgtagagatttaatttttttttttgtaggcaactatgttgcctaagctagtctctaattcctggactcaagcaatccttctgccttggcctcccaaagtgctgagattacaaacatgagctaccgtgcctggtctcaatctgcattttctgagcttattttaggcttacttgattaaagactcacttcctgcccccaacaccagacacctaatagagaatacagtttagcagacatttctccgggctgttgccactgacatctacctcagtgtgagtgggtatccattctttctagacagcatgtttgataggagtgaagtggaagtgagcaggtgggtgctggttaccaggaagagacagggtaagagagggaacatacaggcatatgtccgagccccactttctaagggacataaaaatatcattgaaaatataataggtggagaaaagtgtatttcgtggtacttctttcagggaaaatgcaatgtaaattgaaataataatattattgaggggtaacaatatgccaggcactctgctaggaacttatttaatcctcacagcagtctcatgagctaagtactattaatattcccgttctataggtgagtagactaaagagcagaaaggttaagtaatttgcttaaggtcacatagctagggagtggacaggaattctttgataagttgcttgtggtgaggataacaagggaagaccctcccccggggtagtttaagctcagatgctcacaaaactctgctccagggagagtgagcctacttggttgaagagcactgattttgttgagtagaggatgcaagtttgggccagagtggaattgttcaagaatagagaggaggttggtgctgccatgggtgccctccttcagctccatcgctttaaggaaaggatgagctcatgtttaaagacttttaagttgaaggcagtgctaaataatttagtgtggtcaggtacccacctgactcaggttgaccctgacaccagtgccaggtgtggcagaatcaccaaaatggtgtggaagatcaagataatgctaaatgaaactaccatttaagtctgctttgaaaactcaaggagtttggagctcagagttgccaagaacaagttggaatggcctgaggctgccatgctatgaggaagcccaggccacatggagaggccacatgcttttgactggtcgttctggtctttcaattctcccagctccaggaacagacacatgagtgaagaggctttcatacaattccagccccagttatcgagtctttgccattgaagcctcagacatcatggacagtgacaagtcttcactgctctacccattctgaatcctgaactacagaatccgtgagcataaggaaatgcttaagacaccaaattgtggggtaatttgtcacacagcaacactaattgtgactgtagctcactaaaatgcctcccaaatattatcttcacaactaaaagcaccaaaaaacctgaaagtacagttgaatttcatgatttgctataattatattctagaaagtcactgcaaacactgaattagcaaatactgaaccactgctcctaggagaaatacaggcttaggttcctgtgaaccattctgttcccaacatgttcatcaactcatcaatacttaagcttgttttatgcatgtttctgttgaaagacaccatgtttaatacatattgttgattcactcacattgcactcatggccaacagcactgtaactcacgcctgaatgaagcttatctaactcacatgatcttctctgtaaggcacatcaaagccttctggtgcttaggaacattagacagcacctcagcaccatgcccggggccattgtcaacagtacaatcaccagcggaagacacaaaaatttgtaaaatgtggcactgaatagactgaaaaggacagttgtttacagtgtgagagctgaaagaagaaggcagcgtgtcactttgtatgatctcacctggaaacatgcatcaagtgactcaaaaaaaattttttttttcgagacagggtctcactctgttgccaggctggagtgcagtggtgggatctctgctcactgcaacctccgcctcccgggttcaagcagttctcctgcctcagcctcccaagtagctgggactacaggcacacgccaccacacctggctgatttttgtatttttagtagagacagggtttcaccatgttggccaggatggtctcaatcgcttgaccttgttatctgcccacctcggcctcccaaagtgctaggattacaggcgtgagccactgcgcccaactggcaactcaaatttttcatgactcctcaagtatccatcaatgaccatgagagctccagcgagtgttgattttgaggttacaaatttagtgagtagatgaatccacgactccacaatcagtgactaataagaattgactgcattatttaataagttcagggcttgccgtcgtgattcacaattggagaaagcgaggcatggagcaagtccaggggtgttccaaaaggcctcacttttctcctttgcaaactgtggctgatgagggccatcctgcggggtttgtggagagaagggatagtaacaacagctgcattgtatggtgctatgtgctgcacactttgcacacctgatcatttaatactcacaatgatccctagcagatggatcctattaccaagttcattttacagatgaggaagcttagacccagcaaggttaaggggctgtgctcaaggtcttaccttctaggagaggcagagctggatctgaagccatttctgttctcagcccctgctgtgtgctttcctaccatcctctccagactcgccctgagcccaagttgctgaggcatgtggcacggtgcctggcacacagtaggctcacagtagtggctgctttgatgatgaccataaactgggatctggggtccttgagatgattctaccaaggggacccgggggaagctgagccctggggcaaagtgggggccagcacaggagctgctggggaaggaacagagcctgtgcggtgggaagataggacatggagcaaagaggatcttgaatcagaccccgtggtcccctcctacagagggttaaagcaagccagcctccttccggctgagcggaaatcagattttgagagctgagcagggctctggagggatgtttttcttctccatttgtctgcttgtggctggcccataaaatccaccggaactccatgctggactgaggaattcctgctgaacagggacatggagaacgcaggctgggagggggcatagtgtggatccttatcagagcagagaccaccccatcttcaaggccccacctccaggttgggtgatcccctctggaggcctcataggattcctgggtaaggggagggaccaggatcgacagggtgggggaaagtccaaggaacaagtgataccccctcccaccttttcaaagtgaacttgtggggtgaggaatgagaggagacagggagggtcaggctgtggcaggtcagtgaagtgtgatgcaggttccaccttctacgctgtgtgacattgggcaagtctctgcccgtttcctcatcattgcaaccagggggctggagctagatgaccaccatgtgtaattttctaatcagagctgacagtctgaggctctttctgtctagtttgcaccttgcatgcatgtcctcccctgaaggcagtgcaattattataacccctattttaaaggtaaataaaccaaggctcactgaggcaaggtgacctgagcaattttgcccttgaagggctgggacaggatgcaaacctagacaattggtgccagaattcatctctcaagcattcgctctcctgcctcccaacacgagtttctacttctctttgccctgggatgacctctcctttgtctcttggcttgatgacctcatttttaaagattcggctcatgcatcacctcccccaagaagcctgtcctgactaactaagctcggttggggctcctctctgtctgctcatgcctctgggaagtagctgtctcttttggtcactgggctgtgagccctggatgagcagagccacttctcattccttcctgtgcctcctgcatcagccaacataaaaagctttcaattttccttgaagattctaagtgcttgtggtggttttagaacatggctgccttaagaagtggggtccattggtagctcatgcctgtaatcccagcactttgggaggctgaggcaggaggattgcttgagcccaggaagctgaggccagcctgggcaacacagcaaaatcccgtctctacaaaaaatacaaaaattagccagatgtggcagcatgtgcctgtgggctcagccccttgggaggctgtggcaggaggatcacctgaacctggggaggtcaaggctgctgtgagctgtgattgcaccaccgcactccagcctgggtgatagagggagaccctgtctcaaaaaaaaaatggggtttatgtctcctcctcttgagtctgggtgggctcgtaacagctttaaccaatagaatatgtcagaagtgactctgcgactactgagactgttcactggcactctgtttttggagccctgagctgccgtagaagatgttcaaatactctgggactaccatgctgtggggtcacatgtaggccctcctagtcttcaagtcatcctggtctggggactccagatgattccagttcttagttgtttcatatccagcctttgagtcctcccggctgaggaccaagacaccacggagcaaaaacaagccatccccaccactcctggcccgaattcctaagcataataaaatggtggctgcttaaagccacggagttttggggtagtttgttacacagaggtggtaacgggaacagtgcgaccaccctgggcatgtcaccttcctctctggccagccagaaggtgcagcagccacaaagctctctgcctcctcccttccctcagcggtgtgctgctgacacagcagtcagagatgccccataaatgcttcaaacagaccatgtccctcctttgctcaaaaccgtctgttggctcccagctcactcagaggaaatgccagattcttaccatggcccacgggccctacatgatgggacccctctccagcccatggcctctctgtcctgtctcccaccctctcccttctccagccacaccacctccttgctactccttgaacaccacatacgccctgtctcagggcctttgcgcttgccaaggacagtgctccattgcctggaacattctttctccaggtgttgcttggttcagtccctcatcttgttcatgtccctgctcagatgtcatcttctcagtgaggccctctcttcctactcccaaaccccttgacttgctctattttcctctcgccatggcccttagaactacctaacacactatgcactttacttattgtgtttccccgcccaccccgtccaccctagaatgtcaataccacagggcaggaatcttggttattctttaatgtctccccagtgcctgtaagagtacccaacactcacagtggtttgctgaatgaatgaatgaatgagctgtaggagcccagaaggggttcgttgccttccctaggactatgtatgtggggaagcagagtgggtgaggaaagggcaggattggagtgactgggttgagccagtgtggccagggctggaggacatttcttggaagtgacaactcactgcccagctggggaatcctgaggatgggagagtgcagggcaagcctttgaagatgcaaacatgggtcgtctccggggcctccctccttcctggtcttgtgtgtctccggccctgccagtaaacaggatctctgggcaactgcctgagaaccctgcccagtgccccagaggccctgacgtgctccttcctgagctataaatcaggtaccttccagctgtgtgacatcctggatttgatggggaaggcagagcagacagatttgttgcaaagagctgtgcactgcaccttgatttccttgttagcaaaataggaaggataggagcgttgacttcaagctgtggctgtgaaatcgagtgagataatgcatgaaattcctctgtaaacagagatgcttcaaggacgcattagtgggtggaggcacagggagcaaatcccaactctgccgctgagctctgtgtcttcacctgtaaaatggggttaatgtgaatcactaacttcctagggctattgagggattcaaaaatggagagaaaagtcttagtacccaatgaacgtgcaatagatattagctgttattaatggtaactattaccataatgataaagaatcagatgttattgataagccatttgggagaccgagagtctcagttcataccccagaggggaccatggacttggcacagcacgatttcaaccctgtgccttttgtgtatatttcaatctggtcagagactatctcccactcacaggccacctcctccccctacccccagaaaggctatacttgtgagcacaccacttccctaaaatatgccacaagagtcgacatctagccaggcacagtggctcatgtctataatcccagcaatttgggaggccaaggtaggaggatagcttgaatccaggagttcgagaccagcctgggcaagatggtgaaaccatctctactaaataattttttaaaaattagctgggtgtggtagtgtgcacctgtagtcccagctacttgggaggctaaagtgggaggattgcttgagcccagaaattcaaggctgcagtgagctgtggttgtaccattccacttcagcctgggcaacagggcaagaccttgtctctaaaaaaatttaaaacaaacaaacaaacaaagaataaatatctagccttgaagccagccttgggggtggggtgggaggaggactatttgtgtgcaggagttcaaacccaggccccatcactccccagatgtggaaacttagacatgttatttaattgtcctatgcctcagttccctcaactgaaaaagagaataataatagtacccatctcttctagttgcattgaggactgaatgagttaaaaagtacccaacacaccatatgagataatgctattttcattctaccaatgggtaaactgaggctcagctaggagaaagaacttggttcaagctatcagtcgtgttgtttattggccctaagttgtgacgagtttcattataccattagaagcccccgaacagtgaactcattgtttgtgaggtatctctatctcttagtgattttttagttaaatgagagtccatgctaatcatttataaaaaatggataagataaaaacttaacattgaaacatccatgggcttctttccataagaaatggagaaactcttgctcctagtattaaaaggtcgtgggttccagtttgagatgcaccaagcaaggtaataggaagtccttgaaggttcttgagcagggggaagcatgaacttaaagcatatgaaccatgtgtttgggtcaattcaagttactgagacttagacattgctggtgggatgcaaattgctacaatctctgtggagggtgattgagttccacaaatatttaagataaatgtaagagctcctaccaaatgccaggtgctgttcaggtgctaaggatttgcagcaaataaatccaaccaagtccctctgcctggtgcttattttctggagaggagacacacaatgaatgaatatacaacttagtatagcgtgcactggggaaagaaataagagcatttctacaataatgtttactgcagtgtgaagggggatctgaagaggctggacagagccaagtatgggtgaagatgtggagatagcgctgggggtgtgtggactggagctgccatctggagagcaatctgtccagttaaatctgtacattgggtgcataaattatggccaccaattatttgacattcctcccatctagatgtaggtctatgtatctgctctctgaatctgggctggcctctgactgctttgacaaacaactatggtggaagtgatgatgtgtcagtttccaggcctaggctttaaaagattggcagcttctacttcctctttcttggaacaattacttgaggggaagccagctgccatgaagaactccagccaccccaagactgccattctgtgaggaagtcccgcgaacaatggaaagaagtcctctaggatgagacaccatgtgatggagagagaggccaggaacatcaaggctgtagacatgagtgaagatgccatcttgaaagggaacctccagccgtagctgtttcagttgataccacaaggttcagaaaggagccacccagctgagtccttcctaaattcctgactcacaaagtaatgaacaaagtggttgctttaagcctctaagttgagggtagtttattgtagtgcaaaagataaccagaatagatatatccgatgacccagcaattatactcctggctatatgtccagacaaaattctcttatcagcccatagaggatatggccatattgttgtggcaacagagagttagaggccactcaggtatccattactggggtggtagaaaggaatacatggtaggtgcaaagagctctaggcagcaatcagaagtcacaggtgaagccacacatacaagtctgttatgttctacgtgaagacttatacaccacagaatgcacaaagaacccatcagaatctatggaggtgcagaaaatatgaaggggaaatgggataaaaaggaataactagagagagagaaacaaaaccaaacaaaggagggtgcacaggggtaagttatgataatctgccatgaattgaggtcttattaaactcaacgctctacatttaaaatctaaaaagtaataacaaaggccaacaaaattaatgtgtgtgaatagggggttggttaaataaattgtagcacatccacatgagggagtactgtaaagccataaaaaagagtggcagagcttgctatgtactaacatgtaagagtcccaaagtatgtcgaaaaggctataagaagggtattgaaaaggatgcataataggcttccatttggggggagataccagtgtgtgtggttgtggatatgtttatagacaaatggtatatctgtggaaggatgctcctggggaaaagagccagatgtcaggggagaggggtggatggcacttcagaagagcaggcacccaggagctgtgttcagagaaggaattgccactaacactgggaccacctcctccaggccaggatcacgccaggtgtgggggctcagagtgggcagagagcctctgctgcttccaagatgcccagggtcctgactgtgtccatgatgcaacctcagccaacaagttggttgggcactgcccactgctgtgccctcatcagccactgtcctcacttcattgccactcaccatcaccactctccttcattctgcctgaaacactcctccccactgcccgtctccctctgttacttaatactcaaactagtacagagaataacagaataaaatcccatgtactcactgctcagtttaaggaataatacttttcttttcttttttgagatgaagtctcgctctgttgcccaggctggggtgcagcagcgtgatctcagctcactgcaacctccgcctcccagattcaagtgattcttctgcctcagcctcctgagtagctgggattacagggatacgccaccacacctggctaatttttgtatttttagtagagatgggatttcaccaagttggtcaggctggtctcaaactcctgacctcgtgatctgcctgccccggcctcccaaaatgctgggattacaggcatgagccactgcgcctggcctaaaacttttcaaaaagaattgagagtgaatggttttaaatatgtccacaaattcttggacactcctctcttcaaaaagtagagttacattctccttacctttgagtatgggctgagctcagcaactcatgtctaatgaagaggatgtggtgaatgaggatgggtcacaaaagggatacaacttctgcttaattgtccatctgtccgtctatctctccatgctcacttttggaatccagccaccatgttgtgatagaacccaagatgcatgggcgggcccacatggagaggaactgaggccctctcccctcttcccagtccctgatcaacaaccatcacaaatttgctagccacccagatgaaccccctttggcttggcagcaaattctccagcttaccctccaactccccaacccgataggccttcagatgactgcaggcccagctgacagctgaatttagcttcctgaggaccagaaccacccagctaaaccatgcccatattcctgccttcagaaactgtgagatataaaaaatgactgttagtactttgaaaacattatgttttgggatgatttctaatgcaggatcgattgctaatacagagggtccctggtatccctccccaccatccccatccaccctcttagaagccacaatcctgatgtttattatttccatgaatgttttaccttttactacatataataaatccttacccaatacataggactatatttccttcttttttaaagaattttttctttttgagatggagttttgctcttgttgctcaggctggggtgcaatggcgcgatctcggctcactgcaacctccgcttctcgagttcaagcgtcattcttaaaaatgtatagaagtgcatatatattgtatggattctgtgcatcctacctcgcatgctcttttccttgcacagtgtgcattggcgacccatctgcattgaggcaggcagctgccattcgttggcactgctgggcattcttcccttatatgaatatgttaataccacgatatagtatctgaagtccatgttgatgaacatttggatggtttttattttttgctattacaaacaacagcgctggtaacatccacttgccctcttccctctttcacatggcaccttcttgttcttggaggtctcagctctaacaatgtaaccccaccaaccccccgctccagctaatgggttctctgtccccacatgtgcctcccaagctggcttttgatggtgctccctctgtttttccttctggcatctactccgtgtggtcaacattcagttatcttttcctgtctggagctagagggtaagccccatgaaggcaggcagagtagtgggtttttttccccagtcccctccatccctgatgctttgcacagggcctggcacacagtaggttcgcaagaaaaattgttggatcaggaatggctgagaattagcttcctctctttgggcttcagttttcccatctgcacagtgaaaactttagataatttcggggtgattttaggtttagcctttgagaggtgcctcagtggccgccacaaaatatcggaagaccccaactttcagcagagctggccttgtttcccttgtgtcttagattggtctctatggcagattatgtttaaaaagaatagccaccatttattgagcgctcactacgtgataggcatgctgtcagctggcagatgcatttcctcattttggccactcattaaccctcagaagtagcactgttactatgctctttataaagaggggtaaactgaggcaaagagaggtgaagtcacttgtcagaggactagcaaaggagggagctgggatttgtagcacaagagactatcagagcccattcgccaaccctggtgcagccctgccccactggtaccacagctttaaagaagtggggtgggaggcagaggaggaggacggtgaaggacaagggtgaagagaaatgtttggataagtttgacagccactcttctgaagggctttgccagccgcagcattcgggtgtccctagtcacgggggctccgtcacttccctatccccctgtttcccggccctgatgggtcttgctctgtcacccaggaggctggagtgcagtggcgtgatcacagctcactgcagcctggaactcccgggctcaagtgatgttccccatcagccttcctagtagctgcgactacaggcgtgcaccaccatgcccagctaagttttaaatgtttatatagacacagggtctcactatgttgcccaggctggtctcgaactcctggcctaaagcaatcctcctgtcttggcctctcagagcactgggattaaagtgtgagccactgtgcctggctgagatttattgatcacatagatacctatattattctaagtgtttttcaagtgacaactcatttaatcttcataactgtcctgtgacgtagatagtatcagttttatcagtattttatggagattaagtaacagaagcacagaaaggtcaagtaacttgcacagagtcacacagctggtaagatgtggacccagctttgaatccaggcagtccagctccagaatccttgtgcttcacatcaccacacgctgccttcaccatcacgtgtcagttccacacaagtggatgcccacaatggttgggagtaaggggaaaaggagtagggcttgaggaaaaaataaaagtgaagcgtgtgatgataatgagctatgcttgagaaatgggattaactcagctctctgtacttgatagaaaaaagaaggagaaggaggagaggaaagaagaagaaggaaatatttaactggactctccggggcttaattataacaactgtctggcacctaaggtccttccctagctgggcttgctgcttctctaatctcatttccctacgtttctcacggtgctccagtcactccaggccacacctgatcccagaaacctacttgttcctactttgagcctttgcttgtgctgtttcttccattaagggtgccctttttgccaggtgcagtggctcatgcctataatcccagcactttgggaggccgaggtgggacaatcacctgaggtcaggagttcgagaccagcctggccaacatggtgaaaccccgtctctactaaaaacacaaaagttagccaggcgtggtggcaggtgcttgtaatcccaactacttgggcggctgaggtgggaggatcgcttgaacctgggaggcagaggttgcaatgagctgagatcatgtcgctacactccagcctgggcaacagagctagagactccgtcacaaaaaaaaaaaaaaaaaaaaaaaaagagtgctcctttccccattttaggaactcctacacatccatcaaaacctggcctaaaggccctctcctcaatggaaccttttccagcctttcacttcttggggttcccacagccctttacatgtctctattctggttggctcacctgctagccagtgagctcctggaggacagggatgggtctggctcatctctttaaccgccatgctgagcccagagcctggtaaatggtgggtgctctataagctcgtgcccagtcactcacctttacagctccagtgtctggctgacagtgggtgctcagtacatgtggttggacagatcaatgagtgaatatttgacggaagggtgaataatgacatcaaggctgcattccaataacagcacaatcccagtgctgagaaaacaattcacagccctggattcatatcatggaattctgattcctaggcccctttgttcccagagctatccgatgatgctgaagaagagtccctgggcatcatctgttccagctgtgtgaccttgagcaagttgtttaaccaccttgtgccccaagattctcatctgcataaagaagagaaatagctacaccttcctcatgggctagttacaaggatgaaatttgatcatatgtgccaagcacttaacacaacacatgaacatcacggcattggcatgtcagctatgccaatgactctatttatacctgaatttttatttgaaataatttcagacttacagaaagtttgcaataataatacaaagaattcctacataccatcacccagattccttaaatgttaacattttgcattctttgctttttcattctctctcagcatatatttttgtccagtgcctgaattgttggaaataagttgcagacatgttgactctttacctctaagttaattatcccatgtatatttctaaaaacaagaatattctcttacaaaatcgcaggacagatagaaaaatcaggacactgatacaatgctattgtctatcttatagacctattgaaattttttcagttctactaatgtcctttgtagcaaataaacaaaaagatttctacccccccaccccacccactcagtaaccagtccaggacacatgttgtatttaatgtttatgtctctttagtcttctttttagtcttatctggagcagtttcttttttttgagacagagtcttgctctgttgcccaggctggagtgcagtggtgccacctcggctcactgcaacctctgtctcccaggttgaagtgattctcctgcctcagtctcccgagtagcaggaattacaggcgcctgccaccacgttcagctaatttttgtatttttttagttttaccacgttgaccaggttggtctcgaattcctggcctcaagtgatccacctgcctcggcctcccgaagtgctgggattacaggcgtgagccactgtacccagcgtggaacagtttctttggcttttatggctgacattatttgaagagtttaggccagttttttgttttgttttgttttggtttttgaagatggagtttcactcttattgcccaggctggagtgcaatggcaccatcttggctcactgcaacctccgcctctgggttcaagcgattctcctgcctcagcctcctgagtagctaggattacaggcgctcgccactatgcctggctaattttttgtatttttagtagagacagggtttcaccatgttggccaggctggtctcgaactcctgatctcaggtgatccatctgcctcggcctctcaaagtgctgggattacaggtgtaagccactgtgcccagcctggaacagtttctttgacttttatgatcaacattatttgaaaagtttagaccagttgttttgcagattgtccctctgtttggatttttgtgttatttctttatgcttggattcagatcaggcacttgtggcaagaacaccgcatcagtgacgctttgtccttcacagtgcgtcccatcagggggcccatgatgcctgccgacttgccccactattagcaatgttcactgtgatcatttggtgaaggtggtgtctgccagttttccctactgtaaagttaccatttttctctttgtaattaacgaataccttataggaagatacactgatactatgtaaatattctgtttctctttatatttcctgcccatatatttcctagcaggatgatctattttgcaatagatgcaattattatttgataaaggaatacataaacatggaccaatattccaacagtataaaagagtgtaaggcaaatctcccacccactccgtccccagccaccccgatcctctccccaagccatccctagtctcactgtttcttgtgtccttccagaaatgttctatgcatagacaagcgaatccactcatccatcttcttctcgagttatgtgcatgcagaaggtagctaaatagacacatgatctgcatcttgttttatttcatttaatattttggagaccatttcatatttgaacacaaagagagatctcttgctgattttagaaacttatgtccatctgaggtgcaatcccagggtagtcaatctctttcaggttcacaaataaggaagctgagactcagagtggggaagggacaggtcccaatgtcagaggcaaaacagacttggaaaccagcctggaacccctgaataagagagttgacaggtcttactattggggaaccagtccttccaagggccttttcaacaaaatgccagacccaggctcatgcccccgttctcagcctggcttctccctccttcccccctcctcccctgggtcccttcttaactctcgttagggactcccctccagctccctgctgggccaggccttgggagccccattgatcctctgacagcccaagacagattggtggggagtgtgtattcaggtgcaggcgccagcacatggaggccagatgagaatggggtggagggggtcaggggcctgctggggtggggggattgaggattgaggaaggccaggatagtgcatcccacagacacctgcctcccctctttctcccccaccaattcctgcccttcttggggcttctgttcctcccgcctcctcttgccaggcgtgggcaggccagaggggctggggcagggcctgggaggcctgggggtgtagcagagagaagtcgggatggggagtgagccttgcttggtttgatctcagctcaggccctcttgtgagactcaggcagatgacatctcttgagcctccgtctcctcggggcaataagaaggaaataaacttcatacagcgtccagcagccagtgaggcatggccagtaaaggtctccatgtccttcattggcctcttaaggctcccactgcattgttcctgtctgattatggaagcccccaagccaaggcggcccctcggctctgcctgcggaaagttttcccttcacctgcgcagaccaggccgatgtggcctccagaatggaggggtcagcctaggttgcctgtgacaactctgaaaggccttaggaggcacagcatctcaagtgcacacccgagtatggcgtgatctgcaaggggaataggggctggggggagacataggctttgaagatgaatcaggctggagcagggtggaagtgggctcagggagatggagcaggaggggttggtcagggaagagggagctcaagggaggagacataagcgcagagagtgagatagatagggacccagcagcaagtgggctcagagaggggctgtggtgcagagagaatgagactcagatgggggctgtagactcagagagagagatggggacaaaaggggagtgggggctcaggcaaagggatgaaggcagagatgggaaaattgggagggaggggagcatccgttttgggagggaagtgtcagttttgagcacacacagtcctctgcagcttgaggaggaggaaggctgggtctgtggagggtggggagcgggtggcaccagaacaaagccccgggggtagcagcctgggccctgcagctccttcgcagctgacagtccctgagctaattaccattaatgagcagctgggcccagtttcccgggatttgcattcactgtgctagtcagcgccactgtggatggaagccagcgccagccttctggggtgggggtgactcagggagccgaggtaagatcgctggcttcatgtggggctgaagaaggtgtggctttgcctttcctgcaggttaggagatggccgaggtacaatcgtgcctggaggcagggcactggcatcatccacctgtcctcagccagggccggggtaagggtcttggggaaggaacaggtcttgtggccctcagaagccctcagacatttggttgcaggggccctcagattgtgcagccagctgtccactgcggagttgagggaatagaccacagaggagcaacgtgctgctcaaactcataccaagacagcattgctcgttaagcgtgcctgtgtcagacgctgtccaaagcactttactgaatcttcactaccaaccccatgtggtggctgttattagcaatcccattttacagatgaggaaactgaggcacagagcggtcacacagccagggaccagcagggctggcatttgagcccagtcctcctgactgatccctgctgggcaatagggctgaggagctctcagacctgggttttcccttgtgatgggggctaacagtgcctctctccccctaattccactctctgcagggatgccggtatgtttggtgcccctggcagggttgggaggtgagacttaagtacaaataaataaacagggagcagatggttgtggggggagtggtggtgctgggagggatagggccagggcctcccacttctccttgggaaaacatttctgggctggagcaaatggattccagactcaggacctgggagccccttccccaggcctgccctcctgcctgctggcctcagacctggcccagcccttgggagaaatggtgggctggggtcccgagtcttgggttctgcccatccctcatttctctctcttcttcctgtgtggccttgagcaagtccctttacctttctgtgcctctatttcctcatctgtcaaatgagtggaaggagaatgaactttatcaagtttctgttcaagggccacctcccctgggaagcctttcttgattgctccaggcagcttctgttagagcaacagcctcgagtatcaaggagaacataggtatttgtgtttttcatttcacaacaatccattcaacagatactttctcagggtcacctatgtgcctggcacgatgccacactccaggctgactcgtagtttttctctgtagctccagtgctggcccagagtagccactaataaacatgtgtcatgtgcatgaatgatgagtgggtgactgaaagggagcatgaggagctgcagtgtttcccaaacgtggtacttgtatcttgggggtgggagtggggagtggataaaagatgatacgggtgaacagcaacaagttattaaataacaataaatcaacagtgaaaaagttattcctttttcattacctcccagtccttcttacaggccaaggagaaggtctccgatgatgccaggaacgtgtttctagcacctgtggatctctctttctctctctctctcccccaactcccgcaaaacccaccccaagaaggctggtcttgggctcagagcttctacagacaacactatctagaatttgagaatgttgtttggtttccattttattcattttggtcagttaccttttatttgtgacaagggattttgatttttcctttgtttggacatggccagtgggagttggaagtgtttggcactttctgatgaagtgatcaggaccagggtggggaagagggctcgactgaaaaggggcacgagagcacttgtggggtgatggaaatgttctgtgttttgcttgtggtcgtagttacatggctgtgtacatttttcaaaatgcattgcacgataacacttaaaataggtgcattttattgtatgtaaattatacctcaaagttgatttagaaacacatattgagggctgggaatggtggcttacgcctgcaatcctagcactttgggaggccaaggtgggtggatcacctgatgtcgggagttcgagaacagcctggccaacttagcaaaaccctatctttactaaaaatacaaaaaaattagccgggcgtggtggtgcatgcctgtaaccctggctactcaggaggccgaggcatgagaattcttgaatctgggagacagaggttgcagtgagctgagattgcactactgcaccccagagcgagactctgtctcaaaaccaccaccaccaccagcaccaccaccagcaccaccaccaccaccaccaccagcacatgttgaggatattaagtagataataatacagatggcatgtaggtgtggccaaagtcatgaaggttgcccaccacacggtaaactttgtagtcagtgaataaatggatagataggagatagaatggaggaatgcatgaatgggtaaatgagcaagcgaatgaatacctatctcatccattctacacagccccagcacattgggaggttgtcctatctcaacttgcatagctcctagaatgggggaactcactaccttatgacatagccctttccacatctgaaccactaggagtgtgtaaaagacattttctcatattaagtttatctttctggagatcctgtgctctctggggccccacagacacatctgcttccctgtctggggacagcccaaacacttgccctccccaggctgcccttctctgggcccttctgcccagatgcttggctgctgtgcccaccaggtcctgcttgcacagagcttatatcctagtgggcggcaggacaaagaacaagcacacaggcacacaaacacaatgattccatgctatgaaggaaatgcagagtgagactgttgggaagagcatggcggggtgtggagaggcaaggggagtctctctaggaaggtaatatttgagctgggacctgaagaatgcaacaaagccagaagaacaagagaaagggcattccagatagaggcaagagcaagtgcaagagccctgagatcacagagcaattggaaactaggaagcagccagcctggctggacatggacattttgggtattgatggtgaagagcctggaattgttttctaaatttgatctccaaacacttttaagcaagaggtgatatgatatgacatattttagcagacaatgaatatttcctgaattaaaattgaagacccttctagttccaatagttccatgcttcccaaagtgatactgaaatgacttcaggagagaacaggctgggcgtggtagctcacatctgtaatcccaacgctttgggagggtaaggcaggaggattgctcgaggccaggagttcaagaccagcattggcaacatagtgagatccccatctctacagaaataaaaataaaaataaaaaaattaaggccgggcacagtggctcaagcctgtaatcccagcactttggaaggccaaggtgggtggatcatgaggtcaggagttcgagaccagtctggccaacatggtgaaaccccatctctactaaaaatacaaaaaatttagctgggcatgttggcgtgtgcctgtaatcccaactacttaggaggctgaggcaggagaatcacttgaacctgaaaggtggaggttgcagtgaaccgagatcacaccactgcactccagcctgggcgacagaatgagactctgttaaaaaaaaaaaaaaaaaaaagctggacatgatggaacatacctgtggtcctagctactcagggggctgaggcaggaggatcacatgagcccaggaggtcaaggctgcatgagctgtgatcttactactccacctcagcctaggtgacacagccagaccttgcctcaaaaaaaatttttttttaaaagaaaagagacaatcatgtgatggttgccagaatggcctccagagagggcctccctaggctgaatcctggctctgcctcatccttgccgtatgactctgggccaaggaccttgcctctttgagcctcagtttttacatctgcaaagtgggggtcataattgtccctgtcttattggcttgttgtgaggattaaatgactttatattggagaacagggcccagcatgtcaaaagtactttctgtttgttaaatacaatgaaaaagggtgaggacatgcagaagcaagattaatcctttttcaatctcttccagtcctgattcctgcaaggagagtcagggttggtggggatgtgtatctctaacaccagcccaatctggaggaagttagtaacaaggttatatttatgttgtttatatttacagctacctttatttgtgccacatgatacaatttttttttttttttgagatggagtctcactgtctccaggctggagggcaatggcacaatcttggctcactgaaacctccacctcctgggttcaagcagttctcctgcctcagccacccgagcagctgggattatgggtgctcatcaccatgcccggcttattctgtagttttagaagagacggggtttcaccgtgttggccaggctggtcttgaactcctgacctcaggtgatccacccatctcagcctcccaaagtgctgggattacaggcgtgagccaccgcgtctggcccaaattttccatctaccctggctatttcaagtttccttattttttttttttaaagtaaaacaaaagcaaatagatttagaaattcaagggccatggtccctgaggtaatggcaagccctcctgtcccaaatggcccaaattgtgcaggtggtcattgagccattgatgggactttaggaagcatggttttatttttatttttattttttagatggagtctcgctctgttgcccaagctggagtgcaatggtgcaatcttggctcactgcaaccttcacctcctgggttcaagcaattctcctgcctcagcctcccaagtagctgggattacaggcgcccgccaccactcccggctgatttttgtatttttagtagagatgggatttcaccatcttggccaagctggtcttgaactcctgaccttgtgatccacctgtcttggcctcccaaagtggtgggattacaggcatgagccaccgcgccccgcccagaaacctgtttctaagctcagcacagggaatagctcctttttcaagttatgtcctgatccggatcacttctttctacccgtgtgcaatccaccaagcatcacctggggctctggtgacagcagcatccccttcaccttctttctcttcctgctccactcggcagccagagccagaccatgtccttcctctgctcaaagcctcacaaggctcccagctcacttggagaaaaagccgaagtcctcacccagctatgaggcccctcccaagctgatgaccctcacccctcctcacccctccagcctcgtcacctgcccagccacagcccttctcccacctccactgaccccaccacactggcctccttgctgcttcttgaacactcactctgtgcaggctccagctcaggacttttgcatatgctgttccctctgcctggaacacatccctctgacacccacagggcatttttcctctcattgcccaggtcaatgccccctctcagagaggcccatccaccttacctaaatatttcctagctcattcttcctccctcccctgcttttccctcagagcatatatcactaccagacatcacattttacctttgatacatatgttgtgtgtgtcatcgcctgtctcccagagtggacttcaagaggacagaagtttgcgtctgttttgtactctgatggctccagtgcctggaatggtactgatttgcagaatgaatgtccaggggtgtgtgtgaagggtggagggcagtcactcccagccctgcccagcctcactgtggcccctcagtcccctctccggatatagcttttctctctgcctgccccaccctctgaccctcaagggcaggccagggcagcaagcttgtcccttaggagggaggtttccagctgcagggcagaccttcctcctatacctccatcccaggtaagcccaactggagctgccctctcgtggagggtactccaaggatgaagggccttaggggaagagccaccctgaatgtctctgggcagccaggaacctgctcacagcctccgcgacctcatcgggaaagaggcaagactcatgagagtgaatggcccacggggagttactatgcttgtccccttttacagatgagaaaactgaggctcagagaggtgaatctgtctctagggcagctggagcctctgtcccctcctctgtaaaatgaggagaataactcctccctcctaaggttaccttgaggattaaatgagctaaataaagcctttaaacacagagctgtgtctggcacataggaggtgctcaataaatgttgggtactcttgttgttctgacaggtgaactaactttccaaggtctcacagttagtaagtaacacaaacaaattcaaacccagatctgtctgaatctaaagtgattcccagagggggggcagtggctcacaccagcactttgggaggtcgaggcaggaggatcacttgtgcccaggggttcgggactagcctgggcaacgtgacaagacattgtttgtctccgcaaaaaacttacaaaattagccaggcatggtggtacgtgcctgtggtcccagttacttgggaggctgaggctggaggatggtttgagcctgggagttggagactgcaatgagctgtgatcacaccactgcactccatcctgggtcagagagctagacctggtttcgaaaaaaagtcaaataaataaagaaagtgactcctgtgcacaaccacaaaataataacaataacagcgacgacaacagcaacaacacctccgagcagtaacagcattttccactgcagacggcggcgctgagggtacagggataagatcatccggtgacagggatcatcatccctgcctggcatagaaacccggacatcggaccctgccctcccgctgcttccgcagggacagggggcagccagcagagcctccctctgggggtgccccccaatctggttgcctgggacgggggcccagcgggggtggagttgcctggggggggggcccagcgggggtggagttgcctggggggggaggcccagcgggggtggagttgcctgggggggggaggcccagcgggggtggagttgcctgggggggggtgcccagcgggggtggagttgcctggggggggcccagcgggggtggagttgcctgtggggggaggcccagcgggggtggagttgcctggggggggcccagcgggggtggggttgcctggggggggaggcccagcgggggtggagttgcctgggggggggaggcccagcgggggtggagttgcctgggggggggtgcccagcgggggtggagttgcctggggggggcccagcgggggtggagttgcctgtggtggggggccagcgggggtgaagttgcctggggggggccagcgggggtggagttgcctgggggggggccagcgggggtggagttgcctgtgggggggggccagcgggggtggagttgcctggggggggccagcgggggtggagttgcctggggggggccagcgggggtggagcaccctggacggccccgcggagccccctgcgggaggcgagggcggccctcgggctctggaaggggccgcgcggcctggaagacattacacggctgtcgggcggggggcggcgctcgcagttccggaggggggtcccggcggcggacgcgcggggtgaggggaccgcccggccacagagcgcgctttgttctgcgccgcccccgggagctggaaccaatggattggcggcagctgaggtcatctgtcaggcggagccggggggtcaggcccggggaaggggccgcgagggagggcggcgcgcgtgggccggcggggtgcgggtggacgagccgggggccctgcggcaggtggctacgctgcttcggtcctcagtttacccgtctgtccaacaggaaagatcatttctgccctgtccacctctgggggctaatgtgagagttaaagtaggggagctacagtgatgatgatgatgacgacggaggatgacagccttcccctaatcgcagtctctacttcgggtaccatagaagtgctaagtcaggggctggacgcaaatgtgctttgtagcctatagtgcgtgcctgtgtgggaagcgggatggatgtttcaccccaccctctttcagcccagggaagtcagtggctccccctgattgcctgccttgaccctgggtgccaggcttggtctgccttctccaggggtgataggtgcagctgcccaagcctgagcccaggaacccattgcagcctgtccttggagccttctggtccagggtagggcgggactggagtgacccagataggtggggtttttttttctgactgggggtaggtcagggtctcaaggctctcctttgcctcctacaaaaggacagccctttctttcatcaattcactcattcattcattcacactgccacctgcctgtgcctcacagttcccatccatgagataatgaggcttctaaacatttgatacagggtcccccagggaaggagatcatcaaatacagggaggcccagaaacggcccaaaatgcgtgtgtgtgtatttttggggaaaggactcatggctttcttgtgttctcaaccacgttcatgatcccaaacaaggctaagaagtactggttggagtgcagggaaggcaaataggctcccaaactccaccggagagggtggcacttggaacaaccactttggagagcaatttgccagggtcttagaagatggaaatgggcgtatgcatcagccaggcagctccactcctgggtatacagttgaaagagcagggtgatggcgggggccgttcgcagccgcaaataactgtaagcccccatgcttccatgaacatgatcacgactaacaaacggctacattcacagcctggaacaccacgcagcggtgaaaaagaatgagatagactcagctggaatttattcatttgacagatattgattaacactactatcttttaggcactgttcttagcactgaacctacagtgataaacaagacagattgagtcctgccttaagaacgtacatttggccaggcacggtggctcacacctgtaatcccagcactttgggaggccaatatgggaggactgcttgaggccgggagttgaaaatcagcctgataaacattgtgagacctcatctctacaaaagaaaaataaaaaattagctgggtgtggtgacacacacctgtaatcccagctactcaggaggctaagtgggaggattgcttgaacccagaagttggaggctgcagtgagccacgatggtgccactgcatactccagcctgggtggtagagcaagatcctgtcttaaaaaaaaaaacaaaaaaagcagacacagaagaaaatttgggagagtgtgacaaatgccatgaagaaaataaaactggataaagggacggaatgatgggggagggggctgttttagacgctatggttgggaaggcccctgaagaagtgacatttgggcacagaccagaatgagggagactgggagacaggcacgcacgaatgggatggacggctggggcacagtgccaagggagaaaagcaatccacaaaacagcgcaaaaaaagaaaacattttttacttaaacgcacattcattactattaaattagataagagtctgggaggctctatgccaaattcataaaggtaactgtcccaagagggcaaaggaataatcaggactaggttttgtggtgggcttccgcttgcctctaatactttaaatttctaatatttaattatttaacattttaatattttaatgtttaaacggtaaatatggctgaatgcagtggctcatgcctgtaatatcatactttgggaggccaaggcgggaggatcacttgaggccaggagttggagaccaaccaccccaggcaacagagcaagacctggtctctataaaacgttaaaaacaaaattagctgggtgtggtggtgcctgtagtcctagctactcgggaggctgaggcaggaggatggcttgagcccaggagtttgaggttgcagtgagctataatcagaacattgcgtgccagctttggtaacagagcaaaaccccatcacaaacaaacgaacaaacacattttaaaaagtaaatatacttatataaaacttgtgaaatggctgggcatggtggctcacacctgtaatcccagtgcctcgggaggccgaggcggacagatcacctgaggccaagagttcaaggtcagcctggccaacatggtgaaaccccatttctactaaaacaacaacaacaaaaagccttgtgaaatgaaaacaaaaaaaaaaaaaaaaaggaaatttaaatctaccacggtcaagtgggtgggttccagggcggtgaaggcacatactgcctttcactggagccaagttcctgggggcagaggtttttttggggagggacactgtaggtcatggtagcccagccagtaggagcccagaagcttcttggaggaggtaccacctttgctgagcctgagattctctggcccagcacccccagtatagacaggaatgggtagacatgtgcgcaaggttacagaacaagagctgataaatagaacctgaactccagactcatcccggctgaacccgggttaactatcccgcctctttcagccctgcgcgtgcatccagccccttcccacagctgtagctcttgcaggccagagggacggccctgccgcgggggccggagagcagcgccacctgctgctgtaagagggaaacgcaacttccggctaccagcaggttacaccctttaaaacccagctcctcttccttaaatgatcaagcagtacccctctactccgaatctgttctgcacctccttcgcagtgcctggcagggcccttagcgctgtctggttgggtcttctctgcaagaaggaaaagttgtttcaggagggggcgaccatcttcactctcattccagcccagcgggcacaggaggagtttactcacagaagacaggggcacctcaccttcgctacaaaccttaggggtacacaatccatttgacagcctggaagaagtccccagggaagggacagaaccgcccaaggtcacacagttaatgagtagacaagctggggggaatgagtagactcattccactggggatggaagtggggaagtcaccgtatttgaaaataactgacgcagttattagcagctcttagcatgtggtccctgaacagcagcatcagcaacatctgggaacttgttagaaaagcaaattatcaggccctgccccaactcgcctcaatcagaaactctggggggccgggggcagtggccatgtctgtaatcccagcactttgggaagctgaggcgggagaatcgcttgtgcccaggagtttaggaccagcccagagaacacagcaaaaccctgtctctacaaaaaaatgagaagggcgcacctgtagtcccagctactcaggaggttgacgtgggaggatcacttaagccccgggaggtcaaggctgcagtgagtcatgatcgtgccactgcactccagcctgggtgacagggcatgaccctgtctcaaaaaaaaaagaaagtgggggtggggcccagcaatctggtatttagcaaacaagcttgagaccctgaaccattggtctaaaggaattgcacaccccccctttttttttttaaattaaataaacttttattttggaatgatactagatttacagagaagttgcagagatagtacaaagagttcctgtatacccttcacccagcctaccccaaggtcaacatcttacatcaccatggtacatctgtcaaaaccaagagactgaaattggtatattaactaaaattcagacttttttcagatttccaattttcccactaatgtcctgtttttgttccaagacccaatccaggatgccacattgcactgaagacactctcccttttcaattctattactggtcacctcagtcaactttcccggggaaagagaatgcatgggaaaagctcttgtccttattattgaactggagaaactgaggcttaaaagtgccgagtgaccaagttcccttagagggcagtgagaacaaggcctgccttactctgttccctttccccagggactcttggttttcagaagcccctctggaatgtcctacctggcctaaccccataccagcagtgcagacaaggaggcactcctactacagtgggtccagcccatggagagactcacttcctgccccaacacctcttcccctagaccctgagggccaggacaatgtcttagtgccttccaacttggcagagtgaggccccatgagacagagagaaagggggaagagggaaatacctttatccaaataaatacccatccaaaattatttgtgataggtgaaaaatggccacaagctctttgtggttcccctcatcaagacatgtagtctgtttctcatcccttgaatctgggtaaagccttgtgatttgctctgaccaaaagaacttagcagaagtgacactgtcctagtcccagttccaggccaagaactcaagaagtctttcagcttctactctcactctctttggaatcctgaagccatcatgtgaataagcctgagctagcctgctggagaggccacatggaggagaaccaagcaattccagccaacagcctgtcacctgccaggcaagtgagtaaggctatcctagaccatccaggcccagctgaggtaacagctgaccttagctccatgagggatcccaggtgtgagcagcagaactgccctgttgagcccagcccaaattgccaacccataggattgtgggaaaatacagggtttgtttctagctgccaagtttggggatggtttgttacacagcaaaagctaactggtacacaattctgcatttctctcttggtaatgggatcccagttttattgcaggaggcagtgtgccagtctcagtagatggaacacgattggtctattcagccatgacaattctgttccctgctgtcttagctttgtttgcagctagaggtgcaatggtagctggctcgggccaagggcatctaagtgaagatatgcagagggagagagcaggaaacagacttctgacgaggttttactttctgatagaaggtgacgggtccagctagtttggcccttcctcttcctccacccctccttccttgaacgcagacatgattcttggggatacagcagccatcttgggaccatgaagtaacgagcactgagattaaggcaaaaggatccaagacgtgacccctaccttcgtggagttgttgaaccaataccattagccacccatctccagaatccatgctatgtggaaaaacaatcttctgtttgtttaaaccactgcaatcaaggttttcctttccttgcagctgaatgtagtccatataagaggttacatagacaaaaatgcagagggatccttgtccttgggaatttggagccggcagcacgtggctcttcaagcccatctctgttctccttctcggtaatgcttcaagggtaaggccatgatcctattgtcacagaggtgggaactggggctcccacactgtacagtgagtccaaggccttgtagctggtgagaggggtgcccagagtcagaccctctcgccaggtgcaaagagaatgcacccctgctatcccttctgcatggcccagcctgctggaggccaggtgtgtcttctgggctcttgaaggtggcagcaggtgccaaggaggctgctactgcaagtctggtgtggatgctcccaggtacacccttaggtctgagagagtggactggacaagcttggcggggatggtctctcgctgcagttgctggtaggccgcgtagcggtggcagcccccaaaggagtagaagtagtcacctccctgggcccctttgatccagaggacatcgatggggggcacgctgtctgggtcctcctggggagaagaggcacagagtcaatggacatggtacaaggcttgagagtttgtaaagcagactttgtccacttgtgctgagctccttataaggtgatcacactggactactgtgagagacaactgttaattatcaggaattttgtgagctgttcgacatcaccttgtagcttgaaaatcagccatgggagagtatttacaccagagaaatggacagatgctacaaatcagggatttctcccacacatgtatcagcacaccacatgcacactatccagctggccctgttgtagaccctgggaatacggtacagctggaatgtgactgaatcaggccctggcttcaaggggctccagtctagtggggcagatggaacaagaagtaaatattagagtgacaaatgctataatgacaataacacaggtgacaggacagagatggggtccacgaggcctctctgaggtaagaatgaagcagagtacttggaaagatagagaagtggggccgggcacggtggctcatgcctgtaatcccagaactttgggaggccgaggcgggtggatcacctgaggtcaggagtttgagaccagcctggccaaaatggcacaaccctgtctctactaaaaatacaaaaattagctgggcatggtggtgtatgcctgtaatcacagttactcaggaggctgaggcaggagaatcacttgaacccaggaggcggaggttgcagtgagctgagatcgcaccattgcactccagcctcggcgatggaacgagaatccatctcaaaaaaaaaaaaaaaagagagaagtggaatagtttcgattaagagctcaactgcctgggttcaaatctagctctgctgcttaacagctatgtgatcttgggcaattcatctttttgtgcctcagttgccccatctatcaaattggatggagataacagatccatctcatagaatttttgggttaaatgggttaatatatataaagcacttcaaaccatgcttggcacacggaaagtgctcagtaatgtatgctgtgtatgacctgagggaagaacgttccatgcaaagggaacagcaaacgcaaaggacttgaaaccagagcacgttcactgtgtaggaggcacagcaaggagttcactagagtggactccagggctccaggaatggtcagaaaggccagcaggagccagatggtgcaggtctgcttctgagagcagtgggtgggccctggagtgttggcaacaggggagggtgacatgatctgatgcatgttctagaaagttgtcacaggagaacagacttggcagggtggacagggcacagggctggaaggcagaggggaggcctctgcaggtattcagcagaagatgctggtctggatgatggtgtggtggggacagggagaggtagacaggtttgggacacatttacggggcaggcccaaggggtctggcagaaggggtgaatccaagggcaagagaaaagggagaatctaagttgacttcctgttaggggcccacacagccaggtggagagtaggtcatcctctaaacagggaaagtctggggcaggacgggtgcagggtagagcactctggggagaccccattaagtgtgagcggcgtggaaggcctcctgctgctggtccacgggttctctctcatgattccacaaatgattattcagcagtaaggtgcagcagtcacaagcctgagctctggaacctggcacacctgactttggatctcagctcctctccacagcagctggggcacacagccctctgaacaccattcctcacctgtaaactgggaataaaacatcctagagggctgctgatgaagagtcagtgagctgatgcctaccgggcattagtggagcactaaggagggcagccgtgccaggcaggccttgtgccgggtactggaggcacgatggtggatggccagaatgatggctcccaaagatgtccacgcccgaatgcttctgaatgtgttaccttacatgggagaagggacttggcagacagaattaaggtaaggatcctgagatgcggaaattatccaaggttatctagatgggtcgaatgccattatcagggtccttaaaactggaagaggaagtagaggaagaggtcagagtgatgcgatgtgagaaggccttggcctgatgttgctggctttgaagacagaggaagaggccataagccaagcagtgtgggtggcgtctggaagctgggaaaggcgaggaaatggattctcccctagagcctacagaaagtagtgcagccctgcttggtgttagcccagtaagacccattttggacttctgaccataaataaacctgtgttgttttaagccatcaactttgtggtaacttacagtggccccagaaaactaatacaggtgtatgtaagcaaaggcagagctggttctggccctcagagcctacggttctagcacggaaggcaggtgtctagacaggacgttaaaagccagtgggctgtaatcccagcactttgggaggccgaggtgggcagatcgcttgaggtctggagtttcagaccagcctggccaacagggtgaaaccccatctctactaaaaatacaaaaattagccaggcgtggtggtgggcgcctgtaatcccagctacttgggaggctgaggcaggagaatggcttgaacccgggaggcggaggttgcagtgagccaagatcgtgccactgcactccagccagggtgacagacccagacaacgtcttaaaaaaaaaaaaaaaaagccagtgagatcagagctatgcaggtgggcacacaggtggctgcaggcccacagaagctcctaacccggtagggatggtcagggaagatcctgacactgagacaggaagaccgagaaagagtgagaaacgacaaggcagagatagaagaggttctcaacgggagaaaaagcccagtggtgggacagggcatgcatggcagatcccttcccatctcagccaggcgccgtgctactattgtggcaacagataagatgggacgaggtcctcgcccttgtggagtgcacgtgaggtcaggaagacagaaaataaaatgcaacacaaatagatgtataatataatttctggtggacataagtggtatcctgaaaaacatctcgggctaaggggagagctagagaggccagtgactctgaccaagggtgatcaaggaggcagagagctgaaccaggcaggggagcaggccctgtggttgtctggggaagtggctccaggcagtgaggacactagtgtaaatactaggactgaaagttatcgggggtggctgtagaggtgctgggtggggcttagggatctcatgtgctcaccttccaagggtcgggggaaggggacacaacgttatgtaggcctaacctgacacctgttcttgcggggcccccaagttcctgccagaatcactccggtattcttaacacccttcctcagtggtggagctgacccttgacctctcccacttcccattcagacaagggcctcccagcagatatgacacacctagtcccactgtcactgactgtcacagccatgagagcccacggcttatctccgggtagtgcggtggccatgtgctgggcagtggggcccaggctgcctgggtgtgaattccagccgtgtcactttttaagcgcctgatcttagtcaagccgctgaaatcttccctgcctcagttctcgtctgcaaaagagccactatctacctcctagggttggcataggaaactgagggacttcctgcagttcctggaccactgcaagcactagcgttataagcgttatcatcactactttaattatctcgcccaattccctccttgctcaagtgaggaaacagaggcccagagaggcccagctacttgctcaaggtcacacagcagaggctgagctccggctgggcccggaaccagtccgtctcgcgtccatcgcagcgacctccctcctccggcaacctccctcctccgaagccctccctccggttggctggactccccgaggcctcacccggatcgtgtccacgaggctctgcaccttggcggggtccaacacggacggcagcggccggatgagcacgctcagcggcacgttgtgcaccgcggcgatgcggcccgagtggatgctgccgccctgcgcgccgccgctcggcccgggcccctcgggcgccccccgacccgcgccggccctgcccagcgttcctcctgcacgcagccccatcgtcgccgccgccgcgggactcgccgcctccccccggccttaactccggccgggccataccattccgcgcggccgggggggggggcccgtgccagggcagcgcgcgtttctcccccgaccccgccgcggtccggcctcgaccccgcggtccccagcccgactccggctccgctcgccaggtgccgccagactcgcgcggggctcaggctctccaccggggggcgcctctcgcctcccctgcgccgcgcggcgtccggggagtggaaacgcccgggcgggctgactcagggtgagtttgcaggtcgcggggcgggaggggcgcgggtgacgcaccggccgggccgacttaggccgcgggggcgggggcgggggagagcgcggcggacctgcccagccagggtgagtcggcaaagcccgcggtgcgctgctgccccgctgctggggttcctagccagcgaggttatgatccccaccagcggttccacttccagtctggcgccggctgtgtctggagtcgttccgaacattttgcacgtgtattaacgtatctgaacctcaaaacaaccctgcaaggaaggtatgactgttattcccattttacagaagaggagactgagacacaggtttaagtgatgtacccaagatcacggaactagtaagtggccgaatccgcgttcaaatccagacggtctggctccagagtccgccttctaccccaccgttggctgccttggttcagcaacagtgactgtcacacggagccctcaggagtcgcgctgacaatgggtgggccctgccttcaagttccacactgtctgtttgtgtcattacaacactactggaagtaggtgcagttatagacccgctgttcaaggtcagctgaaatgaaagtcaggtcacacgagtccaaactgtggggccacttaaccaccaactccaagcaggaaggtggacgatcccagactcggtcgaagacaagcatgtctggtttgcttgtcttccttctcaacctgaatggcacgaacatggagaaatgcatacttaccctgccagctggagaaaactggagacgaaggagggagccaggagtttctactttgccttccaccagttgctgacactttctgaaccccgtctgtaaaatgaagtcatgctgcccatcactcaaagttgtgtgaattgagagagtgctcatagtgctctgtgaattgcataacatccattttgctgttgaagatcatttattttgggttcttagtctctcacaaaaccttagaacactgacaccaagactccagcctttccctttcgaaacataattcccgtgcgcacctaaatgatactttatttcaagaagtagaactgacacccacacctcagccccagaattattcagaattagagaatttcatcaagagggaagttatcccttctaaaacatcttcctcattacaggaagtaagaatggcaggataacagtttctagagtggaaaagtggagctctggcctgattctatcatcatggtgtacccagggaggcctcatttcctggtatcaaattctctgtgttaagatatctatggcccaattcaaaatggcttaagcaataagaaggtttgttttctcacataataaaatgtttggaggtaggtatgtccaaggttggtaaagaggcagttgaacaatgtgaccaaagactccagttctggctgggcccggtggctcacacctgtaatcccagcactttggaaggctgaggcaggcgaatcacttgaggccaggagttcgagaccagcctagccaacatagtgaaaccctgtctctaccaaaagtacaaaaattaggcaggcatggtggcgcgcgcctgtagtcccagttactccagaggctgagacaggagaattgcttgaaaccgagaggcagaggttgcagtgagctgagatcatgccgttgcactacagcctgggtgagagagtgagactctctcagaaaaaaaagaccctggttctgtctatccttttgtgccatcatccttggtgttctgttatcctgcggtgtgcccctcatggtcccaagatggctactgtagctcaaaacatcacatcattacatgcgaatgtccacaagtggaagttaggacatcccttcgagcctctttttaagagtgaagaaaccttccctggctggatgcagtggctcacaccttctgaccttccactcctcaagccccggagtcaactctagtcacactggcctccttgctgtgcctcttccacagcgaatgtgtcctggcctcagaccctttacatttgctgttccctgtgcatggaacgctcttccctcaggtcatacatagcatacattactgagtgctctccatgtgcccagcatggtttgatgcgctttacatatattaactcatggaacctaacagctttatgagacgagtctgttatctccatccccatttgatagatggggcatccctgtgggagctctgcccattccagaggtgccaggccattcactaatgggggcaggagccggtgagtaaatgccagtcttgtgctgtcacaggtggacgattcagagaggtgttctagaccattcagatctttctggaaccttctcagagaccagaagtactcagccctattgctacaactgacttcactaacacaccctctgtcccattcctcccaccccttacttctgcttccagggatcacctcccacataaacgacttacactcaagtctcagacttgctatcagggaaccaaaactaaaacaaaagggaaacttgatactgggtcatcccctatagttctgtaccttgcctgggttaaaattgcactattttattagatgtgtgaccttgggccagtcacctgtctgtgcctgtttcctaatctgtaaaacggacataatgtcacctaattcacaggggtgttggaagagtgaagagagatggtgttaggtgaggtccttaaaacagtgcacaacgcattataagtgctcaataaatgtttgctgtttgattgcattttaaattgtaacagagcttgaacgtctctccgtgtcttcactttcagactaggcttgatgtattagtcaagacttttgtttgcaagtgacagaaagccaaagtgaattagcttaatgaaaatggggatgcttggctattcccgtgactgaggtgaagcggagcctcaggggaaagtaagttgagagatttcttttctctgccctcactcagcagagggattatctctacatgtcaggaacatgactgtcaacagcgatgatatttggctttaaataagggaaacctgacaacagagacttcatacaacttaaagtgtttcctctttaaaaaaaaaaacagtcgaggtaggaagtccatggctgggatggctgctccatggtcactagtggcataggccctttctatcttgccgctccatcattttccagcagagttttcattctcagggtcacctcctattcaggattgctgctgaagtgccagccgtctcatccaaattccaccctggaaagaggtggagaaatggaaaggcaaaggatatgacccctccccttttgaggatgctatctcagaagttttgtataacacttccccttgcatgtcattgactagaaattggtcacacggccacccctggctgcaagggcagctggatatgttgtcttcatccgtagcggtaatgtgctgagctaaaactggagttctcttactaaggaagaatagagattgataagtagctagcaatcggggccacagctctcaagttacaggccttatggcacagagacagggagagagagaaaatttccaagttctagtcagatgcctacatatggacaagccagctatggcattgggggacacagactttcttaaaagcataagccaccattatttattataatgacttaaaggtaaggagttcatttaaagataattactggtcacctgctattggctaggctagacccaggggatttagtgatcagcaaaaagacactaccaatctctgcattatgaggcttacagtgtagtggaggattcagataatgaccaaataatcacactggttaatggaaagtatacattggtagtgggtgctgcaaaagaatggcatgtggttctgaggaagtgttttagtcctttttggctgccatagcaataccatagactgggtggtttataaacaacagaactttgtctcttacagttttaggggctgagaaatccaagatcaaggtgactttgtatctccccaacattcatatgttgaaatcccaacctccaggtgatggtgttgggaggtgggcctttgggaagtgattatgtcacggggttcatgggggtagagccctcatgaatgagattagtgtcctttttctttcttttgagacagggtctcactttgtcacccaggctggagtgcagtagaactgtaaagaaaacttctaatttttaaaatcaggaacctgataataactaaggaatcctgaacagagtgttggtagaaatacagatgaaaaaggccatttggatgaggaaatgaggaagatattattggacaatggaaaaaaggccatgttgttataaaatggcaaagaacttggctgaattatgtccacgttctagtgttttataggaggtagaacttgtgagcaatgaaacggaatatttagctaaagctatttctaagcaaagtgttgaagctgtggcttggctcctcctgactgcttatagtaaaatagaagcagaaagaaatgagttaaagatgtgacttttaagcgaataggaagcaaaacgtaaagatttgaaaaattttcagcctatccatattgcaaagaatgagaaagaatgtttgggagaaaacaccatagtctccataaggagactgtaatggtgatgaacgtaatcagccatcccagcaggaaaactgccgtcttgaattgaaggggaaggagatgggaagggatgaggaaggaaagctgtctgacttcttggatttttcaggacaagaccagagtgcaaactcttcaagacaagggaagaatgaccctgaaggcaattcagagatcatcaaggctatctccttgctttcaaaagtcgggagcattgccttgcattcagcaggttagagggcctctgtccaaagccatggaggaagagctgcccagagctgttggtgtggggctacccagagccctgggaacatgacttctgcgggatagagctggagggacaggaccaccaccccagagggtacagagggtgggaccaccaccattgtggatctggaaggctgcctcagtgggcctggaagcagagcatttaatgaactaaaaatgatttttcttgagccttaagatctcatggagtttgccttgtagtttggatgtaatttggatctgctattcctttcttctttcctatttctcccttttggaatggtctatcctatgcctgtctcaccattgtattttggaagcagataacttgcttgatttcacaggctcaccgctggagaacaatttgccccaggatgcatcacaccttgagtctcagccatatctgacttagatgacacttagataataaaactttggattttagacttcagagttaatgctggaatgagttaaggcttttggggctgttggaatgtaaggaatgaatgtattttgcatgtgagaaggatgtgaatttggcgggggatggggacggaggcagaatgctatagactgaatgtttgtgttcctccaaaattcatgttaaaatcctaacccccagtatgatggtattaggaggtgggcttttgggaggcacgttaaggccagttcatttcatggtcacaagatgacatgcttttctgttcacactggaggggaagaggaactggacttcctttcctcttaagaaaaaggaagcagcaaagttttccatacccttccagcaaccctctccttaagtctcattggccagaattgggtcatgtgcccatttctgaacgatgggagatgttagtattagaccagtaaagactacctcttaagctgatgttcagtccccagattgcgtggttgctaatccaggagagaggggtggggtggaatggttattggacccacataactgggctggatatggctgatggagacccagcattctttcccacctccctctagggtgccttctagattgcctagttggagagttaaaaactctatttctcagatctctttgcagcaaagatactaacagggaattaagttctaccagttagatgtactttcatgagacatggatggcagaggtgggccggggccatcttccatcttttgactcttgctactgtcaagattgtcttggaggtgttaagattttctgtagcagtgttccagcattgtgccaccagcacagtgggagacaggagatagttatagaggcagtggcaagggcctgctgatccctggcttgcacctatgatgcggtgttctgtatctcaatagttccagggcaccttattgaccaccaccaacccccactccgcaccctctcccaccactgactgtggaagaggcaggtgctgtctcagtggcagcagttctgcagtggggttctggggtccagcagatggctcacttcagcccttacacaaattttgtcagcagccaattattgaagtattaaatcctttctccttcaaaggaatttaatacttgtttataaaatcctgtctagagtggtttctgttcctggcacctaaaacaaacataatggatccaacagccagtcacgggcagtgtatgtgggtggttaagggatgcagcagatgcctgggtttctcaaaaccccactggcgaggcgggcagatcacttgaggcaaggagttcgagaccagcctggccaacatggcaaaaacctgtctctactaaaaatacaaaaattggctggacgcgggggctcacgcctgtaatcccagaacttggagaggccgaggcgcgcggatcacaaggtcaagagatcgagacaatcctggccaacatggtgaaaccctgtctctaccaaaaatagaaaaattagctgggcatggtggcacatgcctgtagtcccagctacttgggaggctgaggcaggagaattgcctgaacccaggaggcggaggttgcagtgagccaagctcacaccactgcagcctggcaaggcagcgagactccatctcaaaaaaaaaaaaaaaaaaccaaaaacaaattagccgggcgtggtggcacatgcctgtaattccagctacttgggaggctgaggcaggagaactgcttgaacccagaaggcagaagttgcagtgagctgagattgcgtcactgcactccagcctgggtgacacagcaagactctgtctcaaaaaaaaaaacaacaagaaaccactggagattttgcagagttgtggggaggttcccacaactgctgctgtcaaaaacagctagcacattgctcaggatgcagctgcttgtccagaggggtgtgaagggaaggcggacaggcaccagggaggcagtctacaaactgagtgcactgcttacacaggaggaaactgacaaagaggccccagaggaggcagattctagcctgcagcttccccatccctcaaagcatgcaggttatgcttcttggtaagtctgagttgagggtaggtggcaggggttggtggtccccagtgaagtttttagtaaggtgagacagatttgtatcttgaaggatcactaaggcagctatcgaggatgatggattggttgccttgaacacttttggtgacaggcagctcagaagctctaggggcaagtcactgtttttggacaactttccagctgagccaaagtcaacctttttgcctgcttccactcactgaatatgtgaccatatatgactaggcagagcagtagggggtgaactggggaagattataggggttgtaaactggctgtcaacagacacatgtggaccacagttttaactgtttggtgggtgtagttaatttgaatcctatttctctaaggtgagacactctttccaattagtcacaggcttcaccttccctaatgtcttaaggcaactggcttcactcacatgttattaatctggtttttaaacccttatttgaggagtattaaggattgaggatgcctgagaacttgtaaatgccaagggacccttggggctgtgtgacccttggtggcagctacaggctggtcaggctacagagaggaaaatggagtggaaaagtagtatctctcagatgccctccccttcgtctcattcccccccttcatccccaccccttgctccaatcagaaggtctagaggcgatggtgagtggccaaagtccctttaatatccctgaattgcgttacaagtaatactgctggaggtggggaagggatgggggtttgggggtgagttgggataggacggaggaggagcgccaagcgctcatacaaaatatggccaaaaggcttagcatgcatggaaaattattgctgtcagaagttgctatttacagggtcaacgcctccataattgcttctgctacccctctccctcccaccatccctgcagcctcccttcccgctgggcctggagctgagcaaaggcccattcacccctctggagccctagggaagtgcccctgctgcaggggtgcctccagtctcccccctcttttgtggctaagaggaggggagaggaggatctgagagtccaggactcctgcccccaagctggctgcagagcaatggggcagaggcgtgtgcttaaagcggagggggccagggcccgtgcgcgtggaggtgtgtgcttcggtcctcgcccgggcatgcaaaagcgcagcggaggaggtagtggcggccaacgggcgggtggctggcagcccggcccctctgtccgggagagttgcatagacatggccgggagagagcgcccctcccggggagcaggccagaggccccagcgggtccggggctcagtcggtccctggaacctggggtccctcgggaagaagaataaacaggaaacaaatcgaagaggctcctctctccgggccgcctggagtggcaggggaaggttcaggaaggtggggacctgccccacgcctggacctcctgatgctccctcacccccccagttgagggtcagcaagctgcccccccattctcgagtccccttccttagcgagtgcaggctctgaagagggtgggtttctcccgagacgcgggggtgtgtgtggtgggggcagccctctgtggcctgtgctgtccctctccttgcctggcttcctgacctcccagtccagctggggaagccagacggtccctgggtgaggccaagagattaaatagaataataaatagataaataaataaatacacaaataaataactggaaggacccagccggatgggggaagggcattggcgaggtgctccagacctccccccaacaagtaaggaaggggatctgtggccctggggatgggggaaagtgctcagagaatctgggggtagggcagctccagactgtggaagcccaggttgtgccggggtgagagaggggttacattagggggcagggccctgaagtgcccctcaagccccctccaggttaggtagactcagaggggtgagagctgctagagaggtgagggcagctggagctggggctgggagtgggtgatgagatccccatggactgaagacagtaggaactgtgtgtgggagtggggtgtgggggtgtgtgtgtgtgtgaatggccagacctaaggcctgagcatggatgggatcagggacagatcggagacttcaagaagggtgaagattagatccccagatggacacactctgggagattcagcagaggccagagggatggtctggggttggactgtggtctcagggcggcagggcctgcgtccaggtgtggatggggaaactgaggcaggtatgggcgtcaagggtataggtttgcggctttcattgggggctccagtagaggaatggtcagagagattcagctgagaagcgagagaaaagatctagaagttagaagagcagcgcggggtctgggagggagaaatttccggctctggggcgcgggagaggtgcggacctggtgcctgagttgggagccttgaaggcgcggacaggggggtcaaggtccgagggatggccggaaaggatgaagtgggtcgggggacgctggggaagacggtgtggaagtgagtcgtgggtttgggggttggggagaaaagttccgggccgggccgggggtccccacgagagggtcatgggcagggaaacgcagccggggctgggcgagggcgctgcgggcgcaggtagggggcccggggcgcgtggagagcgagttccgggcgcgagggcgaggcggaaggctcagctggccgggccggcgggggtcggcgggggtggctcggccgccttggcgcaggccgcctcgcagtgcttgtggaggtaggacttgagcgcgaagctcttgtcgcactggcggcagcggtagtgcttgaaggccgagtgcgtctgcatgtgcgcgcgcaggttggagcggtcggcgaaggccttgccgcagtgcgcgcagccgaacggcttttcgccggtgtgcgagcgcatgtgaccctgcagcagccagggccgcgagaaggccttgccgcagacgccgcacttgtggcgcaggttgtgcgtgagcaggtgcatggcgagcgcgggcatggacacgtaggccttgccgcacgtcgggcatttgcgcgccagctggctgtccaggctgcggtgcgtctgcttgtggcggctcaggttcgacgacgtggcgtaggtcttgccgcactcggcgcacgcgtgccggtgcccgccgcccgcctgcgcccccgcgcgccccgcgcgccccccggcgccccccgcgtctcccgagccccccgcgtccccgccgcccccgccccgccgccgccgcgagcgcccgtccgagatgaagaaggcgtccatggagtagctgtcggtcactgccgcctcccctcggaagtagcgcgccgacaggctcgactgcgggctttcggggtcgctgtactcctccggcgccgccggcgggtacgcgggctcggccggggccagctccaggcccggcttctggtccgcatcgtagctgctcgggggcaggcggtgcggggcgtaccctggagggggcgagaagtggaggggcggtgagaggaggcgccgaagagggtttcccgctttgagcgcgtcaccctttgcgccttccagcttggcgcccctgtggcagctccgacagtggtggtctccgacctgcacctcagctcttcctgtcaggcagcctgggttcaattccttcctccatcgacggcagtgcaaatagccgccaccccaacccacggagcatggggccagcacggttgtacagagcgtaccttcactatccagtgctcacaaccgcggagtgatggtcttataatacccacgctacaggtagagaaactgaggcgcagagagatgcagcagtctaaccttacagtcaggaagtgatggagcccttgccagtgtgaccctgaagcccatgctgtctctattccaacaacatgctgccgttgcagccctgtaacttctctggatctcagttttctcatctgcaaaatggagcttgtgattggacacctccttccagggtcgttggaaggactgagtaaagtgacgataataagcgtgtgttaagctcttactgtttgccagactctgcctcggtgctttacgcatgttaactctaatcgtcacagacccaaggaagtcggcactattgtaatccccatttgatgtgtaaggaaatgaacaaaggtgggggagcatacagtaattgctatataaatgttagctattataattatgctttttacttgcttggagatagtttcctcccccaccacactgtgagctccccatggttggatctgtgtgcccagcacatgcctggctcaaagtaggtgtgcgatgaatagatgttgcatgaaggaatcacaatccagttagacccacctgccagggttgctgaagcatttaacaggggtcaagtgtgtggcatgtaataggtgctacagaaaggggacttcctcgcacctgctcccaagcctgctctagaagtcgtcggaagtccgcagtgagaattcccctccccctcctcctcccacttagctggagttggaccaggaatcctgtctgccaagggtttgagtgattggtgggtgggcaggctggggtctccctggggattccgtaggggattctcatgggcaggggccattctgatttgcctctgcctcccatggcctaggctggtcctagcaccttccctgagaccctgggggctgggctccctggagagtttctggcagacaaacttttcatcctggcacttgatgggcaagtgattccattgttctgtgattccacagaacaatgaaggttaggtccgtttgggaggtttcccacctggggagtgggatttgaccttctcctggtgacccctgagacctgtaaccactcctccttccctcctcccctagcctccttcactgaagtgagcaggtggaggagggttttgtaaggggaaacagggttcaagatgttcagacttttagctgggtactctggtcagctttcgtttcccacacagcctggctgattcagcctccaggcctttgcctctcatctggagtttgggatggacacagggtgaagtctgtgtgcccctgaaggcaagggtgtgcccttatttttacctctgtcccttcagcagccagcacagggccctctgcacacagaagtcattgtggattatggaagtggatgactcggaagcggggggctctgtggttggatgtaaagggggatagtgatagtggcaattttttaatctggggagaggagatgcccagcctctccgcaccctatgtctcccgtcccatctgcctgtggtctggaggtccccctgcttcccactccgggaaccaggcctggtactcaggtcccagaacattcaggagtgttgtttcagactgagttaaatacccgtcaggcactcccagacccccctccttctccttctgtatttcctcacgttgtaattcctggtgatgataataatagctaatattcactgagcacttactgtgtgcaccaggctctgtgctaagtgcttcgctcccatcatctcactgaatcatcacaaaactactctcatcacagataaggaaactgagggacagtgtggtgatggcacttgctccaggggtggagcaaggattggaatccactgcccccttggtttcccacatactgggaggtcctccaggagggggctgtggctgagctgttcacctcccattcccagggccctagctagtgggcacttaataagtatttgtggaatgagtgatgatgatttgcgaggccagcctcactccccagcctagcaggacctggtatagacagtcctgttcacctggtctcagggcaggtctgcatctcatgtgtctggggccatggaaggggaagggtggtttggttctccaacacagattccagctgagtgcctttgggtgggttgtgcttcaggtcctttttttttaaaatgggatttatctggaggggtgactgatcacgtaaccagtgctttgagttctattattaaaggatgacatattggataagagtaaaactttggtgccagacggcctggattgttttggctctaccattcccagcagtgtgaccttggccaaacgatttggcctctgtgtgactctaccgtttcagtaaggggtctgccagtaaacagtatataaacaaatgataaccagcactctcagagcactcctgtgtcaggcactcttacaagggctttccacacatgaaagcattctacccccatgacacacaaggtggtaggtacccttttatagaagaggaaaccaaggcacaaggaagctaagtaacaagcctaagattgtgcagctgataagttagagccaggattccagctcagtggctggcacattttaaatccaccacgcatgttggctgttattatgaacaataataacaatctccccagatgggtttctgtgctgcagctttcttggcatctgccccaacacatcgtgctgctcctctctgggcctctgtttcctcacccgggatgtgtaatttctatttcacgttctgatgggaaaatatctggtgcatagtaggagctccatcagtgaaccagagcgttctccatgaggtgctctgcccatggcgccctctgctggtggccctcagcgctgttgactttcctcctgttgcaaggggctctttatgaagaaataggggtgccttcaacaaaggctgctcatttgcctagggagggctgcagaagtgtcttcaggataggaattgtgagcccagaccagacacccagtcagtggattttggcatgggttgagagcatcctgtgagagtttgtgtggtcatgttaggaggaggtggttctaacttgctttgtgactgtggccaggttgcttaacctttctgggcggaatctatacatgacaaagatggactggaatggtctaaagaccctttctgcatcatggctgaatcagtccctccatgatgctctttgtcccctccactcccagctcctccaattccaccccgttttcctcagattcacagacatctccctaggcaaccttgggcaagttacttaacatctttctgccacacctgtataagggagttcataataaggctgaataaatgaatgcatgtaaagtgcttaggacaatgcctgacacataatagctgccctcttgagctgttattattgttactggtagtattcctgtgtttcctggtgatatatccttctaatctgccagagagtaggagatacacatgggtgtcttaggctgctgtgtgaccttgagcaaaccacctcacctctctgagcctcaaccctggagactcctttaggacactaaaagccatactttaacctaatgcatggaacccagacaggtaccttcctctgccctaagagtgactatagaaggctgagatacctatcctgcaactgacagggtgagacaggactcttgtttgggttcccacagagatagggatgagctgggattcagagaaaagagaatctcaggtgagatctctcatcctagcccttgaattcaggccgtagccatgtgaccttgggtaagtcgcataacttatctgggctcaaatcctccatttgaggaatgtggaccagaggcacccctgtcatgtagggatatggggagggcccagaaatactttggagatgtgcacatgtcacctggaaatgactttggttttccctgcccaagagtcttgatattttagactgaaggtccagaatctgtctttttaaaaatcggtactcaaaggagtggtgaaagggaaatttatgagaactaaggtgctgggccctctgcagacactgtctcatttagctgcctgaccccctgcggggatggagggggatgtgtaacaaatactgctactgctactgctggtgcttccaactagcaccagcctccctgtgagccagacattgccctgtgcccagaggcccagagaggggagaggatttgcccaaggtcactgagagggaggcggcaggtttgaaaccctccaaggcctgtgttttttccaaaacaccagagagggcatggagacttgctggggaagagatcttcaattggtaggggaaggggtggtgcgtttcctcaaacactccctagttagcctgtggtggggtgggtgggggcacggggtggtgggggcatggagaagctgttgtggaaaatgcttcagcctcttgtaagtatttgtaaatcatacttaataacagtaatgcctatcacttactgagcacttacttggtgcaaggcatcctgctaaatgctttgtgcacattagctcatgtctaaggtcacttccctccatgcccttgttctgcagaagctgaagcccagacaaaggccttgacccacctcaggtcacaaaacaagttctcatcagagctgggttggcctccttttctttcctttttttcagtccaggactcctttccccagtctctcccagactcccaaggtgccaaactttctccagggaattcctagcctcagcctcacctctctgtcctaaaatgggcagaaaaagacaggggcctggtggggggccagcttccccggcggcccactttcctgaggagggctgggccctgctgggtggtaggggctggaggagctgctgtatgggtatatttagagctgcttcttgctgtgccagggcctcgggcctcgagaatcagctccagccagctgagcagaaagccaggtctgtcagcagcaaagcgggataaaaatagtttctcctgtctgctcacagagctgggcaaaggggctgggtacctccccctccccttattatagcatctttgttagcggttccctgggcactggaccagaaatgacacccacctcctccaaaggcctggcagctggtacatctgcccacggggaggaggtccctgtgcccaaatgagcaggggacagagtgaggtctggcccaacatgaccaacgctgcatggcttggggctgatgcccactgacccaggcccaaggaactttgagagaatttcaaggcttttccccaccacccccatctcttggaattccccacattctggtctttcctgactgtgacccaattcctgtggcctacagggaggtccagagctctgcaggaatcaataggaaagatttttcaggggggtatggagatgagagtgagtggctcagggtcttcatttgcccagcctgggttcgtagagttgcctcctgctccctcgggggggatctccagtgggccctttctgggcctcgttccggagactgggtgtgttgtgcagtgctccacctcttcccccggcctcctactttctgctctgccgcctctctctctagaagggtgcactcagagggcccattccaaacccctccctatccaaaggctggcctggcagtagacgcttcacttcaggggagtccacagctgggaaagagaccaagaggcccgagggaccccatctctcccggcagagggcctccaggctgtgggggcccctaaaacctgtggatgtagcacccactagggaggtgtgacagggtgcaccgtttatgctcttgtgactttgggcaagtcacggcctctctgtgacctcagttttgcctctgtaggttggagtgaatcctcccctgccccccgctgccctttgcccactgtggatttgtgtggccagagagtgcctttgggatgtgtagattgctgtactgacataagggacttggtgtactctctggccctccttcagcaatcaaagactgagactatctaaagtgtggaagctcagctcaggaccctcacgtccctctcgtaaccccaggctttagaggaaatcaggggttcccagattccatatctcacatgggcctcatcattccacacttccactgagccctgttaattcacaggaatattagatttctgggtccctagaaggtcaaagctgaaagagatcatattcaaccgtttgatattatgaaaggaaaacagaggctgggaggagaggggagactaggccaaggccacacagaaggctaatggtgagtctaagacttgaactcagcccagccttgagagcggatctggacaatgaccttggactggaaactgggcctgaatcttgattctggacccagcactttgccctggacctgttcataggtattgaaatttgaaattggacatggatttgtcctggatagcagacctggacctataacctcagacactgaccttggacctagtccttggacctggtcctatacctgaagtttgacgtaggcattggacttggacctcagatctgtacttggatgttggactgaatgttggaccttgacctagactttgaacctgggcctctgacatgtctttaacctggaccttggacctggaccaaggccaagttaccagggaaaggggtggttagagaagactcagatgggtctgctgtgtgtccatgggcacctccccagccttctctgtgcttgctcttccaaaagactggggaagcccttttgcattgctgctccccagaggagctttctgaggtgtggaatggatgtgtggcagctggggacattgggccgggctcccgggcttggcctggagcgactacccggcaccatcagagggagtgagaggaagtgggcgctggtttaatgtggtcagctagataagcccatgggtagaagtaggagagtttcctcagcttgctgggggaggcttaatgtagctgcagagggcagacaactgtgttattggattggcattgatccctcatctgcctgggttggatgcactctgagagggcaggagggcaggacagggcggggatgcagaggaaggggggcctggctccaagctggggttcggagttaaggtggaggggaggcagacactccagaagatattcttggcaggggcccacagagaccactgacatgcatgtgggtgggccaccttctttggggtggctgagagtcccagtatccttcagatgggggccccggtctgtggggagggcctggtggagttggagggtgaggttagcagagggttaggatgatgtaagttggcatctcccagaaagactgagtctgtgctcagaatcacccaggggagaagaggggaagggaaagcagtggaggagcaagagaggcatcttacttgaggggacaatgaaattagatctattcccacttatcagggagctctgcagagagacctggtgctttcttcatttgaggggctccccttccctgtttaggagttctgtgggcttggggggaccctggagcacagacagacttgctgcaccctctgttctgcctggcggtagaggctgaaagggagtaggaaggcaaagaagagcattgctcgtgtgtgtgtgtgtgtgtgtgtgtgtgtgtgtgtgcgcgcgtgcgtgtgtgtgtatggaggaggagcaggagtcctccaggaattctccagcattctcaggcattcccagagctggggtacacctctttaatttggggttctgcatctttatcagctaggagcttgtggtttctctgacctccacattcacaggctcccccaacccctgctcccccgacccaggtttccctcccgccagcctcatcctgaccctgcagcccgagctgcaggaatggcttgtaagaagatctttctaataactggaactatctccagccccaggcctcccccgccctccctccctccctctctccttccctccctcccttgcttctcctccctccctctcctcatcttccccccctcctctctttctccttgtttacccagcacacttacacacgctgagagagaaaaacgtcggctcagcaatttttcacacttccctcaaatgctcagcaaggttatttccggcagagcggagacaacgggccaccaggagccggcgggctctcagcagacccccagcaccctccacccgcccagggaataagggatccctcactgcccagtctggccgcaccccagggagggaagaggcccctgaaaacaagacaaggcagactttgtatttcccagtcatacctaggcttggtctctggcactgaccgtccactgcagacactgccaaggtggccaggccagggtgcctgtcctcactatggggtagcctacagagaccaaagccaagaaaagtgcccgatcccagaaatgccgctaccctcagccaggtggcgtatgttcagtggagccctaaggaaaccctgacagtggcctcccagcatcctgttagacccctgtgcaggcatctccagtgcctgacattccatagttgaccttcacagaagctgagcttgtcaaagttggaaggatgcttagtttatgccatcaaaactctttcactgctggggaggctgaggaccagagaagggaaggcacttgcccaaggtcacacagcatgtgagagatctagagcccaggcctccaaatttcaggccaggtttctggctatcagcacagcctcaggattcctgagaggtgagggagttggtctggagacccatggggaaggggacaaagacagaggtggttctagggtgttaaacccggtggaacctctgcagaaacaccctgctggtggctctgcacccgccctgcttcccactattcactcaggggctcctttcaaagcttttttttggactgaattcaaggcaaggcattctcttgcctccctcctgaggaacagcctgcagttttggctgtgcatgggaaattctctgggcttctctgggtttcctcagctggcctggggacaggaccaacggggcttcagggggtggaatcccagagctttgtgtcagtgtcagtcccttaagagatccatatcccaagcttgcagatatttcagtttctaccagctttgagcgcacactctccagctttggcatggccccaggtccaccctctgtcctgccagccctcagccctgctcagccatgtccctgggcttctgacctccacctcaagaggccctgtgatcaagaaaagaggacagtagaataagggacatgtgggcagaggagaaggggtttctgttaagggtctgggggatgccagtggatgaggggctgtagctgtatccctgatcactctgtaacttctttgaccttgatgaggtcacaaagccctttgcccagcactctctctctctctacctggtgtggcagagtgatggaatgtgggtgaagtgcttggaaatcccagaggtggaagcccccatcctcccaggctcctgtctttgccatctcagttcccccctcatcctcagtcctttcttttctcctctctcaatctccctctttctctctctctctttccccacccccatctctctctctctctctctctcacacacacacacacacacacacacacacacacacacacacaacccaaagctgccacatgtgatgtcagatctctcactaccaaagggacacctcctcttcagacacctgccctggtgggggccatcaggggagaacccctttgtgatccccttggtggaggatgggatccacagaagcagtctccactttcccctgccttccagagatcacccccttctgcacctgaatgacttctcttgttcctcaaacccttgtccctgcaggaacttgttctgagaagagatggagtgtgtgtgtgtgtgtgtgtgtgtgtgtgtgtgtgtgtgtgtgtatgtgtagtgaggagggggcttacgaggagcagcagggttggttctggagggggttgagaagctggggatggggaaggagtgcaatccaggggaccaggagccactttgggggaacccctcccagaaatcctctctttcttgcagtccccaggacaggcccagcctttggcaggcatgtggctgagggtaacaaaagagttattgagagagggggtctgagagcacttgtgtgacatcggcaggggagcaggtttgaagggagggagggcgcccccagccacccccagggaaccaaccctgtctctccagggactgaacatccagggctctttaccttcccccttcccgggcagccagcttctcttcctcaacgggggagagggaaccctcaaagtgccttgtgcctcagtgcccagcgctggcctttcacgagcagccccgtctgtgttctcttgccaccccctcactctagccctatttgagggccacaactttcaaagtcccggctggcgcgtggctgcgggatgggccgaccccgcgactttccctttgtacgacctagcccctgccccgcccgcacggcccttggaaagcccgggaggagcccacggccagagagatctcctcccgggggtttcctgtcgcacgcgcccctcctcgtggcccaagctggggagggccccagctcccctcgcctcttctcccaaccccccgcccccgccgggtcccactcaccgttgtccccgggaggcccccgggcgccaggcagcacgtaggctgtctccaaggggtggtaggtgggggccggcaccccgctgcactggaagccgtcccctttgatcttctttaccaggaaggagcgcggcatggcgcggccggcgcggggctcggtgcggggaggcggccggccgggcgcgatcggctgtgtccgcgcgggttttcagcactggacagctcccagcgggctggagcgcgggaggccgctcggagccggcaccggtggcggcggccccggctcgggctcgggcttggcggcggcggcgcgcagacaggggatcgcgggagctgcgctcagcactccggctgccggctttatatgggacgcaggctggagatcaggtggtcccctagcaatggaaccgctcggcgctctaatccatcaaatgtcccccaggacaatcgctccgcacacgttcccctgaaccggcggcggtgggggcaggcccggagcaggcaggaggggagaaagtgagggcgagaaaggcgcagagacagagagggacggagaaaggggagtgaggggggcggggagaagaagagagactcggagaaagacagagacatacagggaaagagagacgcacacgctgagagaggtagaaatagaagcagagagaccaagataaggacaaaaagacacaagagagaaacagagagagaagaaagacagagatggagagaagtagcaacacacacacacccacgggaggaaaagagaaatccaggcacacaaaaaggaaacccccccagggatgcaaagaaagggaaagaaaagtgcaaaagagagggggaagccgaggggaacggagggaaagcggtcccgagcaggcggggttcaggcacatggggccgcagggaaggggatgcagaggaaagagtgcgcactggccagcggccaccctcccgcctccagtcctctccctctcccccagttctgaagtggccagggtggacgctcagctttcactagagtaagtctcccctcccccctgctcgggctcccactggagccccctgttgggtttggggttcaactttcttcttccagaactggtggggggagcaagtcccccacgccgatgcctggccttgctcggttggtcctgttccggtgcctagctcaggcgggcgctgcaagaggaagtgaaaatcgtccagtaattaattttcctgctgccggggggtggtggttttgacacatccgaggcagtgtctttccctgaagcggggagcagacaatagagacacgtggactgggaagggagaggggggaagggagggggagcggggctcctgctggaactctttgcaggtcagctcctttgtctctaaaaggatctgagcagacccgccacccccagtccgacccaaacctgggggagcccccatatcttggcaggaccaaggagcaggagagctcagccccctgcccagagggtgctgggcaaagccccatggtggcggacctgctttagcaagtgtgggatggccagtgcacaagagtcccagaatcagactctaggaattccaggctctcgctgtcaatggaattctggttatgagatgcaaggctggtggagtggggatgtccttttgggactgggtcatccaataccagtttgcaggctaagacctagagagggcttggaggtgcttgaggtcatgcagtgagtcagcagcaattgccagagacctcagtggcctctgggcaccactgaatcagggcctatcatggtccttgaggtgtagcccagaagtctcagaataaaactggggcccctcgtggtggttcaagcctgtaatcccagcattttgggaggctgaggcaggaggatcacttgaggtcaggagtttgagaccagcctgggcaacatagtgagaccttgtctctacaaatagttaaaaaaaaaaaaaaaattagccaggtgtggtggtgcacacatgtggccttagctacttgggaggatgtggtgggaggatcgcttgggcctgggagttcgaggctgcagtgagctgtaatggcaccactgcgctccagcctggatgaaagagcgagaccctatctccaaaataataataataataataataagttagagtttccaatgcaggatctgttggccttgaatattttcaaaagacataaagatgcaaggatgtggaagcagaaggtttgccattgaatttgccctgtatggttttagattgttttccctgaccgaaataaggaattaaggcagtttactccctatatataaacattgaaaaacattgcaggtccaaaacaatgggggcccctgatcttgccaaggccctgcatggtctagaggtcccccaccatctttcctgttgcattgcctcatatcttgcccatgggaattttttttttttttgagatggagtttcgctctcgttgtccaggctggagtgcaatggcgcgatcacagcccactgcaacctccgcctcccaggttcaagtgattctcctgtctcagcctcctgaatagctgggattacagggtgcgccaccatgcctggctaattttttgtctttttatcagagacggggtttcaccatgttgcccatgggacttttttaaacctctgtcactgagagttgaagtgaccacacccttgactcatggcacgcccatgcattctctgctccagccataggtgcctactggtgctttgggcttgcagctctcttgacctgtataccatttccactgcccagagtccttccctgcacttcaccctaggaaacccctacttgttctcaagactcagccgaggggtcacttcctccaggaggtgtccctgacttccatcattgcagactgggccaactcacccactggtccctgagcttcatgaggacaaagactctgtcccatgtatggcttaacacactcttaacagtgtgcatgagggtcttctagctcccctacttattagccataggtccttggacaagttactcaaccgctctgtgcctcaatttccccacttataaaatgggaataataattgtcactacctaagtgttgttgggagtgttagaagagttactacatataaagggcttggaatggtgactggcatatggtaggagttcaatgcttgagggttctatatatgcagttttgcctgtagcatgcagcgctcatttgttacatgttagtgggattctgtggaatgagtggtgaactaggcatctctggtccctgctttcttgcagctgatcttgcagctgtccattcattgagtggatggacaccaagcaagaaaatccttaaatcaacaatatattttcagatagttgaccagtgctgtgaggaacataaaacagggtgagatgatggagagtgatggtgcctttaggcagggtgaccagcaagggtctcctgggagaggtggcatgtgcacctagacttgagccagccatggaaggagcccaggaaagagtgctccagccagaggcttcacaagttcaaaggctctgaggcaggaatgagcttgagcagctgaggacagcaagaagggaaggaagatgagttcaacatgttagcagggccagacccagagattactccataaatcccaaatgaatgagtgaatgaaagaatgaatgattgtaggggtgagattcagcctataactatagcttacaactgtgactaagtagacctattggttggagaataacttttcactgtttacatagaggaagttgcttatttgttcagtcattgacaattgtggtatagccatattttttagtttgtgctgggtacttggatctctgtcctctaggggtgcctagttcactgtgggtaaataaggcaagtgggtgtcatctagctcacctccacctgcctgatggttctacctctccaacctcacatctaagagatggcaaaacggatcccagagtccttaaaaaggaatataggtcacagcaacttttgacagagctgggactggactgttctcactgggcaagatagtgatccaccccttaactgatcaaaggaagccccacagaaatggtgtattaataggtcctgcagcccactagtgtcgggttgaggatagaaccccaggtctctgaccacaggttggaaggtggtgtgggtgcatttagcatatgagaagaagccttgagccctgaagatgaggttccaaaataccttcagaggggaggaggccttaagtatggatgaaatacacaatggccagcagaatttcatcactaggacaccaggaagggccttctgtcccccaaacctccccccaccccagcttactggtttcaggaagttcactgtggggaattaatttctctaagtcacatgaaataaggaaataacttttattcccaaggatgttcgctgcagcatcagagatggtaataaaaaccctgggttggagaaagcaaggagagggttgtgaagaagacgttcactccatgtagtattctgcagccattaaaaattctcatttggggagaaaagctcataaaatgtgttaagtgaggggtgcagaatacagaaacctctcacagcacgttcacaaccatgaaccaaaacaaaaataaacacacacaaaagagtgaaataagggtctggaactatggggtttccctctcccttctttttgtgttttccaaaaagatcataaaatatttcagttcagccaggtgcagtggctcacgcctgtaatcccagtactttgggaggctgaggcgggtggatcacgaggtcaagagattgagaccatcctggccaacattgtgaaaccccatctctactaaaaatacaaaaattagttgggcatggtggcgcgcgactgtagtgtcagctactagggaggctgaggcaggagaatctcttgaacccaggaggtggaagttgcagtgagctgagatcgcgccactgcactccagccttgtgacagagcaagactccatctcaggaaaaaaaaaatagttcaacaaatatttatcttgagcacttgctaactgtcacttacttccaaatagaagaaatgctgaagtttagtaaaccatgtcaggatattcactattcattcttctgacttttgggaagttggcattgtgaatttccccagtggcaataataattattagtacatcgccagcaacattacagagccaccccacaggcctggcagtgtgctaagcactttccctttgaagaaggtgaccttgcctggggctttagattgagggatttggagtcagcctattttcagtttaaattcctgctctgccatttcccgactgtgtaattctctgtgcctccattttctcatctgtaaaatgggtgtataaattgggcctgtctcacaaggttgcagtgaggattaaatgataatataggcatcaagtgcttagagcagtgcctggcacacaataacttgataaatgttgacagttgctatttacatatcctcacttatctaagccttaccatggcctcatgggagaaggtgctgttattgaaatgactggttcatggctacatagtcactgtacagaggagctaaagagtgtcccatgtcttcatggcctactgccttcctgcccaggagccccaggtcttggcataataggtctagctggctgcaggcttagccctctctggcctacctcgtctgctctggcatcttccatatttcaactgtgccctgcccatcaggaagaagggcagttcccagggtctaggtgtgagtctcagggctgtgtgaccctaggtggctggcagagccaccctgggcctcaccctgcacatccataaagaggggttggggcatcctatgattcactggcttcactctatggggtcaggaaggagcactgacctgggagtcaggagcccagttccagccctgcttctgctccctttgccctcccctttgggccccagctttcttgtctgtcaaatgggaatgggacaagatggtccctgagctgctgtccagacccggtaatggaattctgtatgaattccaaggaggagagtagccacaaatgcatccgctccacgctgatggggctctctctccggtaagcttcacttactctgccatttctccagtgtattttatcagacccacctcctctgagccaaagaaaagagggtaggagcaggatgaaacaaactcacagctctgttcattcaggctcatcacagagatgacttgcccaagggcatgtggcaggtcctctgaaatttgaggaaggctgtgttttcttttgtgtcactttggtcctccgggaagcagatgtgaaaatggaggtgtaagtgtaagagatttattgagaaaacaccgtgagaaatggaggagagccttcagagagggatgcaggtctgatactgtgaaaggagaggtggaataaagaaagattggggaagaggagcctcaggccatggtgcaggtctaaggaagtcctagccaacccaacagggagctcctgtgcaaagatttcctgtagaggagtcccgtgctcgacagaagggcagaccctagtttcccaccatgctcagtcatcagccggcctgtcctggaagagtggctgtgctgacaactatggcagattgcaaaggtgttgcagctggaggctctcagtgactgtagtccagagaagatctgagtggcacctccctaaggctgccacatgtttttctttattcatttaatagacacttacagaactctgggccatgtgccagttactgatctatgcactttacaaatattaccttagttaatccttaccctcgccttttgagacagatggtatttttagccccattttatagagggagaaactgagcacaaagaggttaagtaagttgcccaaggtttcacagccagtaggtgataagccacaaatccaacccaggcaagctgcttggaggctctgctctgaccactccaccacactgcctcctctccagctgcaaatgccttggtggcaatttctgggaccatttccattttcatttttcattggctcaggacctcacagccttaacaggaaggggcctactgtggtggctgggggcatagcagggtcccagctccccctgaagcttctaccttgctccctcaaagacttccacctcaaagcctttgcatatattgttcccactgcccagagcactcttccacccccttccttgcctaggtaacccctcctcccatcgctcccttgcctgaccccaggatctagcccaggataggggtgatatgtagtggaaaggagctagttgacatttattgagcacttattatgtgctaggagccaagtccagccctttacatagattgcctcacttaaccatcataacaacctgtgagtgtggcccatggctatccccattttacagatgaggaaaccaaggctcacagatgcaaggtgacttgcccaaggagacccagctaggaatcagtggtgtcagtatttaaaccaggctgcctggctacaaagtcctgatcttaaaccatgagtccttccctctaagagggcaaaagataccaatgctagggtgggtaggtgagggccctccaaagaatgtccctccccttccccctgccagggctgacagctccttgagtgggattccggatctgctccattcattgccgcacctccatcgtctacccagagccgggtaaatagtaagtgctcagtaaatacatcaattgaatgaataaactaatgagtgaaaaaccttcttgcgacccgcagtcaccttggtcccctttgaccagagccaggttgacgtgtcaaccgtcaagatatccctctgttttgggtgataattagatttctatcttgactgttacagacattggtattcctccattaaaatgtctttctttcaggccaggtccggtggctcacgcctgtaatcccaacactctggggggccgaggcgggtggatcacctgagttcaggagttcgagaccagactggccaacatggtgaaaccctgtctctactaaaaatacaaaaatcagctgggcatgatggggcgtgcctgtgatcccagctactcaggaggctgaggcatgagaatcgcttgaacctgggaggaggaggttgcagtgagccaagactgcgccactgcactccagcctaggtgatggagtgagactctgtcttaaaaaaaaaaaaaaaagaaagaaagaaaagaaaaaaagtctttctttcaaagttggagacatccctaaacattctaactcctgtccctgacaaggtcccatcttaagcaggtctctgaaacctctggaagaaggaattggctatcaggagtctgatcaccaggctgcctgcggggtcagggtatttggggtgggcctctggcatggtttagcggtgggctggccaaaagcccctagacaagagcccaccattcaagcaagtgggataactcagcgtttgggcctgggtcaccctgagccaagttttattttttatttttattttgtagaggtagggtcttgctctcatccaggctgtagtgcagtgttgtgatcatggcttatggcagccttgaactcctggggtcaagtgatcctcctccctcagcctcctgagcagctgggactacaggtgcatgccaccatgccctggctaatttttaaactctttgtagagatgggattttgctatacttcccagactggtctcaaactcttggcctcaagtgatcctcacgcctcggcctcctaaagtgctgggattatagatgtgagccactgtacctggctgagccaaattttaatcctggctctgcctcttcaagctggttggccctgggcaagttactttgcctctttgcagctctatttcatctctgtaaacagaggccagtgggagcacctgctaagtagggctgtagggggcttcatgtatagtcagcccttggtaagtgggagctctacttgaagggcctttgagataacagcattgtctcctccccacccccatttgacagttgtggaacctgaggcatgggacagggaaatgctttccctggaacattcaggctccctgccaagtcaggatgggcttcctcactccaaggtggcctctcttgcctccctctcttccccaccagccgagctcagaaccatgcctgggagatgctgaggtggcaatggagctgcagagttggcatttccaggctcccaggactcctggcacagaggaatcaacccctctcagcagccccggctctgcctcctgctccctgcctctgctcatataccagctgggactcatcagcttctagagaaagccaggaggtggcccaggtgcatggaggcagggggctgtcaatattgacctgtgcttgaccgcagactttgccagtggacaggttgctaaggagtcagaatgtccacatgcccctagtgctcatcttcctagcctcccatctcacctagctgcagagggggagggggagcacaagagttgaaagcgtggatgatctgggttcacttcggctgcttaccaacaagttacccagcctggggaagtttcccatcctctttttatctcagtttcttcaactgttacatgaggatgttgatactaatggcttatcttgaagggcagatggaagatgagtgaggtgtttgcacacagccagtgctcaataatattggccattgttaattctgaggctatcctcttacagtgacctcttgggcctttcagccccaaggagcctctcctctctctgactcctgtggctctgtcaagatcctgcaatgaaattcttctggaaccctatccagatggtgaactcttcaagggcggggaccccatacaggtgccccattataggcctggtacacaacaggtgctcatgaaaaggcctgcttggctgtgatactacatgaacttacagaaccctcacaactacttttggaggcatatgacatgattatccccttttataaaaagggggacagtgggtaacatcgaggtgaagaaattgcccaagcagctgggcgcgatggctcacgcctatagtcccaacactttgggaggctgaggtgggtggatcatttgaggccaggagttcaaggccagcctggccaacatggcgaaaccccatctctgctacaaatacaaatacaaataataataataataataataataataataataataataataataatagccaggcatgctggcatgcacctgtaatcccagctactgaggctgaggcatgagaatcatttgaaccgggaggcagaggtaagagggagccaagatcgggccactgcattccatcctgggtgacagagtaagactctgtctcaagaaacaaacaaacaacaaacaaacaacaacaacaaagaaaaagaaagaaaaaaattgcccaggggctcacagctataaatctgcagatacttattgtgacctgccatgtgccagacactgtgctaagagctggggacacagcaatgaacaagacagagacctgctctcatgtggcttacatcctgctgagccaagagtaggtagatatgccaatgtcctgtcatagaaagcaccaggcagggaaatgggcaaagacagagagaggtggaggccgggcgcggtggctcacgcctgtaatcccagcactttgggaggccgaggcgggcggatcacgaggtcaggagattgagaccatcctggctaacacggtgaaaccccgtctctactaaaaatacaaaaaatcagccgggcgtggtagcaggcgcctgtaatctcagctactcgggaggctgaggcaggagaatggcgtgaacccgggaggcggagcttgcagtgagccgagatcgcgccactgcactccagcctgggcgacagagatagactccatctcaaaaaaaaaaaaaaaaagagaggtggagcgagagccattttagatagggtagtcaaggaagacctctctgaggaggtgacttttgtgtagagtccagaatgcagcaagtgctgggtgaagcctcaggaaatctgctttagcattgctgtggcagattcagggtggaatccaggagatcccaggactggtggtgcctagagcccagttggctagatcaacttcagtgtggataaatgactcccctgcccccgcgaacttaccttcctggagcagttaaaagaacggggcacatgacctagattctctgagcttcacttttctcatctgtaaaatggggattgaaaagcatagcttacaattctgagagctgagttgattaacagagatggtccatgtaaaatgctgggctcagagctgggctgaccagattcacctagtccttggtggctggagtgggcaggtgaccttccttttggccgtccagcaccctccaactccttgcttctgagacctcacctcccactcatggtatcattgctggccttcccagccccgtcttggccagggggcagtcaagtgacccagattagcctcgtgccattctgttgagggtgtggtggttgctacattgagtgtccagaggtagcaaggactaaagtcctggtgtcagcatccagcgttggtgtcagcagcacgagctctgtcttggggacccgtggtgtcagcagtgaagtctccctcaggccagggctttggtctgatttgagggcttttttcttttctggatatgaagcctgtaagccttctgaccctcctggagatccttcaggcacgtctgcagccatgggtcctggatgatttagcagctcacgccattgtctggaaactccactggtactatttttctcatgttcagctctctgtgcacagactccatccttctggcccagatggccccttggggatatgcacataccaagttctttccactgtcctcactttgagggcaggggcctgggttgttcatttttgtgtccccagatcctagcacagagcggctcagaggaaaggctcaatgcatgtccatggtgtcaacaaatcagtggcacaggatacagtttccacacatctccccatcctggttgcttccccgaaccattttccagtctgtcagtgttcttctgaatatacaggatccagaactgagcacaaaactccagaaataggtgaatggagctgagcagaatgaaactgtcacctcccttaccgtagataccggacttctaattacatgaccagacatttaataagcttgttttgtttccctgggtggcatatatcaagctactagcaagcgttttgttttcatggtcctctacccacatattgttgcaaaacctcactttactgcccttctcccttaatttcacgcttataatagtattgcccctctctcacttcccaggaatgccaagtcgattacagctcaagagcccaatcttgactggtccgtagcctggaacatggtgctgagatagatgctgtaactgagtttgggctcactgagaaagactgctgcaattgattaacgatgtctgccaagctgtgtaaagtgaagtaatgtcattccctatcacaagtcctaacctggggtccatggaaagaatttagttggtctgtcattaacttggatagggaaagtattacatctttaatttcattaacctctatctgaaacttatcattccttcaattatgaatgcaggcaacagaccacagtggtattagcaggacctgtgactttgtcaccaatagaaatcacagattttttaaaatgacattacagacgttccgcatatcttgaaatataatttacatgcactgtgacttggaaatgataagttatttgctaagtactcatttacttactcacatttgtttagcgcctagtcaatagcctggtgacgtgccaggacctgggctgggtgctataggcaaaaggcagatgcgtaaggctcagtccttccctcaaaagagaaaagcagacagtgacaatggaaaggcttgatgctttgatgggggaagtacctgaggcccccaacccagcccagagggatcagggaaggcttcccagaggaagtggcctctcagatgagtaggaagtaaccagacccctgagtgctgagaaaaagtgttcagggagcagaaacagcatgagtaacgaagctaggaaagaaagaggacacagggcttacaaagtattccatggcggggatggggaggggaggagagaagcggggagatggctgggggggtcaggcaggcccctggaagtcatgcttggcggtaccctggtcgtgggggggaaggggtgctggcgcttgctgccccatctgtctcagtggcattgagctgtgacttcagtggcctggggaagttcaaggtcacctctggggtggaggaggtggagacatctcaccagggctggcaaaggccaactgggaagctggggccgatacctgcccctcacggcagccaccacaaggggccttctgctccgaaggcccaagcacgccctgttcctttatttatgggccgtgtgagcaatttgctgcttgctggccggctggctgggtgtgcgatgcggggattactcacgccccagttgtggtccggcctctgcaggctgcggggtagtgagtgaggtaattaagtgtaaaagatggagcaggcaggggagggctgagggcggtgagcagtcactggttcttttcaggagcaggggagtgagataatgtaggataatagcctagccaaaccctgcccaggcagcccggcctgtgctgagaggtgccccccaaacggccaagacaattcagccttttcagggaaaatgggggggcttgggcagggcctggctcccagggacagctgtatggaaatgacagctcctctccttcgtcctgtcctgtgttggctcagggtaggggcaagtgtaagtgtcttcagctggggatgaggccagggcagggggcagtagatgggaccaggaaagctggtgggtgagaggagggatccatgcggggctgggagactgacctgtgtatgtggcacaggcacagtggttcgtggcagcagactccagggcctgactcacctggtggaaactgtggtgtggctttggctagctgtgtgacatcagcctagttgtggtccttctctgagcctcaggactctcatctgtcaaatggggctgtcaaacaattcctacttcccgggggtgtttggagaatggttcgtagcgcctgatgcacaggggctacgaaatgcttgacatggtgaagtccagaatcagagtgcattagtcattcactcattcagtggataaatgtttattgagtgcctaccatgttctaatggttcctgggaaagcagcagtgactagaacagagtccctttcctcttggagatgacattctaagaggggagacagaccattaatcgtgaaacacataagcataaaaggtcataccagcaatcccacttctgaaaacttattctatagacatgtttgcatacatgtggaatgaatgcattcatggttatttattgcaattttgtttggcatagcaaaatcttagtaatgatctaaatgcctgttacacatgggctgactgaagtatggaatattatatagccattaaaaagggtgagaccatttctatttctgtttatttttatttactttttttagagatgggatctcactatgttgaccaggctggtcttaaactcgtcactggtgagaccatttcttatgtactgatatagaaagctccctaagatgttttgacaaataagaaaaggaatgtgaaggatagtttctgtaaaagaggagacaatttgaaaaatgtatttctattagcttgtgtatatatgaaactaataatagttgttacccaaggagaggagtagggttggaatgagagacaggaaggggagagtttcactgtatacttttctataacttttatttttgtatgaagtgaatgtattactagttcaaaaaagagaaaataaatattcagcttcctctttcctcctttccttcctcagcatttgttggaggtagctgttgagatttgggactaagcaacaaaggcagctgagtgaggtggtggctcagtgtgcctggggattgaacaaacaggttcatatatcaaggataatgagagccaggttgctcagcatcagagaagggaattacaagtatgaaaacaggaaaggctagaaagaaccctgtggtgttagattggagttagaggaatcagtgtaaactcatagcttttgatatatatagttacataagcatgcatgcaagtgtgtgtgtgtgtgtgtgtgtgtgtgtgtgtgtgtgtgtgtgtgtgatgcatatgtgcatttcccagttctgtccaaaaagacagcaataatcaatacaccatgtagccacgaatacacctaacacctagatcttgggttttaaatactattctccactgaaaggaactggggcttgggaaaatagtagatttgagggctggagcaggaaaagtgccctgtgcctggtaccatggtacatgaaacatctagctgtgccatatgataggcaagtgctcaagtaatgctgaggacatgtcaaaagaccaaggtgccaacttaaagggactcccaatggccaaatctgggacaacttgagtatcaaaataatgacagtaacagattataagccatgaaatataaatagtcctgatatacagacacatacacgtattacatacacacatacatacatacacacatgtgcagaaagagaaagctctttcttacactagaatgcccaataataggtgtggaaggaaggatgcaactagtatggtaataattgattcaaacaagaagcattactagatgctaaaactaaagccattgtgtgaaaatttgttgaggagtaggatatttacatagtcttaaagagtctttccacaagatacaatacctgcaaaaggaaggagagtgactttatagcgaagaaacatggcagagactatcttagtcgagtgatcaaaggctgcatcactgttactggacaaactgacatgaggctcctgatgggatgcacagggaagagtgaaaaatcacttctgtgatgttcctgccagagatgcaaaactgaaatctaatcacgaggagccgtcacataaacccaatttgaggaaccttctacaaaacaactggcctgtaacctgggtaagtatcaaggtaatgaaaggcaaagaaaaactgagggaccgtcacagattagaggagactaaagagataagacaatgaaatacaatgagtaattctggatggatctttttgtttattataaaggacattattattgagacaatggacaatatttgactgggctctgaagattggatggtagtaatatatcaatgtcaatttcctgattttgatgattttattgtggttatgtaggagaatatacttgcttttaggaaatgtacactaaagtattccaggataacagggaatcaaattgacaatttactctcaaacaattcaaagaaaatctctctatatataaatctctaagagagaatgataaagcaaatatgtttaaatgtcaatatttggggattctgggtaaacaatatatgagaattctttgtacaatgtttgcaactcttctgtaggtttaacattattttacaataaagttatttacatgaaactgaaaccatatgatgtcaagtaatgataagtgatatatagaaaaatcaagtgggcagaggaacagaaaatgagggggtggtgctattctagatggtatggtccaggcaggcctctctaggggaggacctttgagcagagacctagtgggagggagggagtagctccatggatacttggggagagtctcaaaggccgagggacccatctgagaaaaggcccagagtgggaccagcttggcctgtgtattagtgtctattgctatgtaacaaatcatcaccaacttagtggcttcaaacaacagccatttagctcacagttctgtaagtcatcgtctggcacagagcaactgagttctttgctcaggatattacaaggtagaaaccaaggtgtaggttgggcttagttcttatgtgaaggctctggggaaaaaatccacttccaatttcattcttttcttttcttttttttctttttctttttttttttgtgcagttgcagagaggaaaggaggaaatttttcgatagaaaaatcttggagatcctgttgctgtcacccatcgggctgttggaagctggggttagtccagaagtcttcaggtaatgccagggtgttgccctggccaggaactctcagttgcctctgaacttcttccagccccacatgatggctaagctctccatgaaaggagaccagttggaaacaaagccaacattcccagcaccctgagggcactgaaggattggctaagttctccccggcaagcctgttccctgagaaaatggaggacagagtccttaaaatgaaagagctggggtctgtgcctatactcactctttcaatgaatctacgtcggatcccaggcaggcccccacaatgaagtggtgttgttcaactgaggtaatacccaaggttcgttgtctcatggccacagaaaactaggactcggacacaccagagtgaggttaagagcagaagtttaataggcaaaagaaagagaaaagctctctctgttgcagagagaggggtcctggcgaaaatgggttgcccccaagttcattcttgttgttcgcaatgttcagcgtcttgcggttgtgggactgaccgtaacagacgatttttttgttggctagaagccacctgcattccttgatgtgtggcccctccatcttcaagtgagcaatggtgttttgaatcctccttatgcttcatgtctttgacttcctcttctgtgaccaaccgggaaaaactcactgctttaaaagggctcttaggattagatcaggtactgtgttagttcacttttgcattgctataaagaaatacctgaggctgggtgatttataaagaaaagtggtttaattggctcatggctctgcaggctgtaccagcatagctctagcatctgcttctggtgaggcctcgggaagcttctaatcatggtagaaggtgaagggagagcaagtggtgtcacatggtgagagccagagcaagagagagaaggggagggtgccagattcttttattttttatttttgttttttgagacagagtcttgctctgttgcccaggctggagtgcagtggcatgatctcggctcactgcaacctccacctctcgggttcaagtgactcccatgcctcagcctcctgagcagctgggactacaggtgcacgccaccatgcccagctaatttttttgcatttttgttagagatggagttttgccatgttgctcaggctggtctcgaactcctgaactcaggcaatctgcccaccttggcctcccaaagtgctgggaattcaggcatgagacatggcgcctggccccagactcttttgaacaagcagatctgtgaactaaccgggtgagaactcacttattaccaaggggatggtggtaaaccattcatgaggaatccgccccggtgatccaatacctcccgccaggcccacctccgacactgggaatcacatttcaacgtgagatttcagaagacacacatccaaaccgtatcaagcatacccagagattttccgtatcttaaggccatttatgccaaataacataagctgatcacaagagtaaacgccaccatattcacagcgcagggtattttacaggacatgtacacaggatggggaggactgggctgaaatcctggaggccatcttagaatctgcctatcatagttgccggggttgagaaacaagaaagccagtgtggctggagcacagtgaacaagggggtgcagggaggagagacagcagagtatcacaggtggagagacacatatataccacctagcctgatgggaggctgaaggcctgaaagtcaccttgtgcaattttggttcctgaggaaggggagggtcatgcgagttcctccatggattcacttgcactaaaaagcacccctggggtgggacccagtcgatgatggaagtcaatggaatgcgtgttgaagagtagcccttggagaaccagtgggctgctgggcataggtgataagttctgctctgtgcatttggcccagtaggcacaatgccaagaagccatgggctcgtcaaggatccatggagaagtctgaaatctaaaaaagctggctggaaaaatattttaaaactttccaaacttgaaagacttagtgaagtgcctaccaagtagcattgtgtcaatgggtcatgagcaacgcccaagtctcctaatagttacatatgcgttctatgtgatgtgactgcattttgtttccattttaacattattgtatttattttttcgtagtatcatgtgcaatgtacaaataaaaaggaacaaaaggagatgccctgaaaagcaagtctctctcccacctctgacccccagccacgcaccctctccccactgaggcgtttcctgtactcaaaggtattttgtgcacatgctaatgaacatgtatatatacacctgactcctccccttttcacaatggtggctgttctgcctgctttttttcttttttcttggcagtacatcttggagatgtttcctattggctcatgtggagctgcccattcttttgtacagcagcagagcagtctgttatttggatgaactgtcatttattaactagacatgcccacaaccctgccacctcttttcctaacacactgggcagtcttggcctctcccaggctccctgggagggtcactactttcacaaagatgatgcccacttctgcccatggaatctggcttgcccagtgactacctgacagggttgagtgacaccacccagaagtgcaaagaaggcagtaaagaagaaagaagaatttattaggtgcccgaggaagggctcaatcctgccagtctaaacattgttgtacatacctcctgatatgtttttctagaatgtctccaggaagggattgctgggaataagtgcaaaataatgcccaattgttctccagagtggttgtacaactgactcccttatcaccagtgtcaaggagtccttgttccacataattgatcacatttggacttgtctagctttttaagttttgccaattgagtagacaggaaatgagcttttaatttggatttctctaattactcagaggttgagcatcttttcaaatgtttgttggctattcatgttttcgcttctctatgtctgtccaaatctttagtccatttttctttttgattgtttgtccttgtcttattgaattgtaggggttctttatatatttgggtgctaatctttgtcagttaaattgttacggacatcttctagcttgtgacttgtctttccacttttaaaaaatggtgaactttgatgaacggtatcggttgtaatgtaactaatttattaatatatgcctttatggtttgtcctttctgtttcttgcttcaggaatcctttccaacccaaagccatccccatgtttctatgatgcacatgtatatatattatttatttatttattttttgagatggagtctcgttttgtcccccaggctggagtgcagtggcgcaatctcggctcactgcaagctccgcctcctgggttcacgccattctcctgcctcagcctccggagtagctgggactacaggcgcccgctaccatgcccggctattttttttgtattttttagtagagacagggtttcaccatgttagccaggatggtctcgatctcctgacctcatgatctgcccacctcggcctcccaaagttctgggattacaggcgtgagccaccacgcctggcacatgtatatatatattttaaaaagatcatatgtgcatcctgttttgtagctacttttccacttacctaacatgaaggaacattttttccatgtttaaatagtctacaacatctttggtaaatggttgcatagttttccattgtatggaatatacagtctttatttactgaatcccctgtgatgaacatttaagttgctttcagctttcatatgatcaataatgctgccaagaatatcctgaagctgttggggtccacattcatgatcatttctcttagataaagtcatagaaatgaaattgcccatagaatttaaggcttcggatacatttgaccaaatttgccagaggatccacttttgattcctttccaagaagcaatatgccattgtgttcaattgcccttcccaagagtctggaatcagcaaagtaggggtcctggagatgatgttttgaactggagctgttagcaggcatgttctgttgtgtgcagaaatagttactgtagcagttaaagattttccctgtcctcttccttcctaccctctcctgactcctgacaggtaagatgccattattagtactattaagagaaaagagccaagaaattaggcctgctttggtaatgattcttggctaattaattgcatttccaatggccataagctcctgcttcaaccagcacctctatgtgttgaaggcaagaaaaggggtccactacagctgctacctcctgggctgggcacataacattctcataaaaatgtttgtccagtcaatgaaggatttcggttttttttaagagacagggtctcattctgttgcccaggctggagtgcagtgtcacgatcacggctcacgcagtcttgacctcctgggctcaaatgatcctcccacctcagcctcaaatgatcctcccacctcagcctcccgagtagctcggaccacgggcacatgccaccatgcctggctgatttttgtattttttgtagagatggggtttcgccatgttgatgaggctggtctcgaactcctggctcaagcaatccacgtgcctcggctttccaaaaagattacaggcatgagctaccgtgctcccggtcaggaatcttttaaaagtctcctgggttgtcttggatgagaaaaataaaaagaagtctcccagagaacttgaaagccttagatcaggattcccttccttcagaggggtaagaggtgggtgccaagcatttaattcttaagcatttattttagcaaatatcaacatgtatagtaattgatacttttatagtaattgatattaattttcatgtatggcagcacaaagtttcccattagcgtgaactggctttttgtttttttaaatgaggctatttaaagaaaaatattaagtaaattggtggaagatagcctgcagatgggggtggggaggaggtggtgtgattccgcccaaacttcgagaaacactgcttcggtggaaaccgctccgtgaggaaggccttaagccagggctgggttgggtcaggagaaagcagggccttgggattccaggcggagggcactgggaggctctggagggtgcagtgaggctgccacagtcaaaggccgggcggctgggaggggctttcggagctcttcctggtatttaaatcatatttagggattataaagtgtgatccttctcattgtgtcatttgacactcacagcaactttgtggagtttcaggcaataaggagattgccttgtcagtttacagaaggaaacggaggcagagagagacgcagcaatttgcccagggtctcaggtgagtaaaaggcctcagtggtgggtgtgggcagcatggctggaagaagcggaatttggtgtggaatttgtggagatgtgtcaggagttgcacctctgggactagggcactcacagccctctcctaataacaataacaaccaccattagcatttatggagtgctcgctgcgggctggctctgtgctgagcaactctggctgtctcactgcacactttacactaacgcaatgggaggggaggtgtcattatcccccagaaagtgtcaagggcaggagttattgattcatggtgtctgctcttgtagaaatttgaattccagtaagggagaggggagccagaaaataaccacgggaagacatcaatgaatgagataatttcacataacgataaatgccagggagaaaaaacccacagggcaatgtgatatggcctctggaggtggagaaggaactgctccagatgaggccatccgtgaaggcttctctgaggaggtgacattagagccagagccagtaacgtctggacttgaacctgggcttgcggcatgggagagtcctgcatctgactccaaacttcccctcctctgtctcctgtggatcacagaatgcttttgccagagactcaatcccttgttaagaatcatggagttggccgggcacggtggttcatgcctgtaatcctagcactttgggaggctgcggcgggtggatcacttgaggtcaggagttcaaaaccagcctggccaacatggtgaaaccccgtctctactaaaaatacaaaaaattagcagggcatgatggtgcgagcctgtaatcccagctgctcaggaggctgaggcaggagaattgcttgaacctgggaggtggaggttgcagtgagccgagatcccaccactgcactccagcctgggtgacagagctagactctgtctcaaaaaaaaaaaaaaaaaaaaaaaatcatggagtcctggcttagggaacggagtgtccaggaactagggatgaaaggatggtaagatatccaagctggagagacctcacctgtggtgctgccttgtccaactccaggagcttcatgcacttgccgacagtggagttatgccacgttaggggtcactctagatgattcccctggccaaagggaaaccaagtcccagagacgagatgggtcctgccaaaggctgtagcttacagctgtgcaagttgtgctgggctccagggagcccaactggaggctaaggggatgccttgcatcccaccagggggctgcaccaggaagaaagggtacctgtttctaattcacacaaaggaatgctatgggctaggggtggccctgagcctcgtggaggatgggggcagaggtgagatccccacatcgttgtgccatcctttttcccacctctcctgcttcctgctttgttcctgccagtccctggagggcaggcgggtgagcatcttcaccattgagggatgccccctccttaattgtggcaaggggggccctttgcagcccagtgcaggccttatgggacagtgaagaggaaaagaagcaagctggccaggattccctggggtttttgtggagctgacaggctgaggagtggttggttccgggggcgggggtggcccagaagtgccttatctcctctgggccagtgtcagctcctgtccccagcctgcagcacaggctggagctgccagcctggggactgcagcaaatttgcatttatattggagacttctgtttccagggcttggggggaggaggggtggccaccaccatcagctgagcagagatgcaggagaggaggggcctgcagccctgtcctgccaggggcacaggaagtggccgatgggcccagtctgcctggctgagggaacagtggcacagaaggttctctgggcacgcggccggccccgacagcctgcctgtccaccctcccagacgctcgccaacatcagctgggagttggctctgcccccaggcctgggagaaaggtcagaggccggtgccagcaagggactaagcaaggccaaagcactcctgtgacagggtgcaactgcgtgtcacccggtctcagccccacaaaattgtaaattgttttagccaagaaaacggaggctcagaggggcttagccattagctcaaggtgatccagcttatcatccatgccccatgagcctcccaggaacacccgggatactcacacaccctggatgccatctatacttaggggacaaagaggagttgacaccccttttccagctaagttctggagggtcaagggaagttattgcaggctcgtgacactgttagggctggttttgtgacagcttaggaatcatgtttctttctctcttttctttcttttttttttttttttttagagacagtctcactcagctgcccaggctgaagtgtagtgcagtcatggctcactgcagcctcagcctcccgggcttaagagatcctcccacctcagcctcctgagtagctgggaccacaggagcatgccaccatgcctggctaattttttaattttttattattagtagagactgggtctcgctctattgcccaggctggactggaactcctggcctcaagggatcctctcgtcttggcctcccaaagtgctggtgtaagtcatggctcctggcctcatgtttcgttttatggtgaaatccataaaatgggtttttttagggccaggttcaggccaggtttccccttgtctttggagaatgtagcttctcccatctgtgaggttccatgtgaagaaggaatggaaggaaggagagaagacaagaagggaaggaggggggacaggaggagggagaaatagggagtgaagtatagaataaataaatagaagaggggggccgggcatggtggctcatgcctgtaatcccagcacttcgggaggccaaggtgggcggttcacctgaggtcgggaccagcccgaccaacatggagaaaccctgtctctactaaaagtacaaaattagccaggtgtggtggtgcatgcctgtaatcccagttactctggaggctgaggcaggagaatcgcttgaactcgggaggcggaggttgctctccagcctgggcaacaagaatgaaactctgtctcaatcaatcaatcaatcaatcagtagaagaggggatagaaggaaggagtggaaggagggaaggaagggagagggagtagatgagaagagaagatagagtcatcctgcaccccgccccccaggtgtgcttgttgctgctggaagtgccccctctgtgccctttccctggctgttgtatggaatggtggtcctctccccatcctcctcaccctacagctgagacctcctgacctccagtagcaggtgagccctgctccaggtgggggaccagtgacaagctggttggggctccaggaagcagaagttggggccctgttgtgatccctgggctttatttccatcctcagggctcagctgcctctggagggggctctgccttgctctttgggttctctccacacactccctcccccactcttccagacggaggtcttggccccattcccccagcctgtggctgtaggcttgcagctgacaaacctcctggtcctggctctccgtccagcagaacaagccctccctgtctgtcaccaaacagtcaggacggcctgttccacctggcaggctggactattgcccagcttagtcttgggaagtgaggaccagggctgacaacccactgcctgagttcaaatctttgctgtgcctctttctggctgtgtggccttgggcaagacccgttacctctctgagcttctggcttctcatccgtcaatgggcataatgttaggatctgcctcttggattactgtatgaatgatacgagatcgttcatggaaagtgcttggcttggtgcctggcaccaagacatttcagcttatattatcctagctgtatccttcagtgtctgtctggcctaggtgggatgtcaggttccagggacctgtccccatgcttcctccattaacccctttatgactagtgtcacctgatatgactatttcaacacacataggattgaaccctggtactattataccattactacttctcctagttgttgtataagtgcttatgggatcaggcactgttcaagccattttaaaatatgactccacattcctttaaattcctctaatcaagaagtggggcctatgtcccctctcttgattgctcccaggaataaaatatggttagaaatgaccatgctggctgcgtgcggtggctcacgcctgtaatcccagcactttgggaggctgaggtgggcggaccacccgagggcaggagtttgagaccagcctggccaaccaacatggtgaaaccccatctctactaaaaatacaaaaaaattagccgggcgtggtagctgtaatcccagctactcgggaggctgaggcgggagaatcacttgaacccgggaggcagaggttgcagtcagcctagatcgtgccactgcactctagcctgggcaacagagtaagactccttctcaaaataaataaataaataaataataaaaaaaatgaccatgccacttctgcttgagtctctggggacactcactcttggaactgttggaacccagcctgcatgctaggaggaagcccaggacccacggagaggccaggtgtggatgttctggcctgcagtctccactgtgccactcctaactgccacacatgtgaggggaagacaattctagatgattctagtcccctgccttcaactcttttcagctgaggccccagatactgtagaacagaaggaagccacccccatgtgctctgtctgaatctgtgagcataagaaaatggttaacagtactacacgttggggttgttatgccacagtaaatcaccagaatccctgtgctgactcatttaagcttcacaacttaggaagtagctgttcttatcatctccatttcatagatgaggaaattaagacccaaaatgctttagcaagctacctgagtccacagatcttctaagaggaagagctgggattcgtgcccatgggtttgagcattgaagaatcaagcagggcccatgtcctacagggcctagtgggccacataggtgactggatgtcatcttgagggccttggagggctgtgggaagacactgatgtgtggaattcacgaggtcgggagagggcactaagaagcttgcttaggtgcaacgtggagggtgggtgagaaggggctggaagtggcccacgaggatggacagtgccaccctgccatggtccaccatcctctccatgtcctgctcctcaaagttacgagggcagcagcaggaggcctggtctcaggccctaatgagctctgcacctatcagagcttggcctagccggagatcccagccaattcctttgggctgacttaggctgtgcccttggacggacagagctgggcagtcagggctgggagcctgacagtgtgaacaggaagttgacggcccaggagcatcctctgttccctgcacatcaaggtgggccacatagctccaagatcatctgtgccaactggatctactgggtttggagttggctgagagtggaagggagcccacaagaagagtgacctaaagaggacagacactgatttctttttcttattaccaatctggaagcaggcagtcccgggctggtataatggctctttgatcctcagggacccagactccttctatcttgttgttccaccctcaacacttcatagtccaaggtggccgctcattctctggccatcatgtccacattccagccagagggaaagaggaagaggcaaagaatgctctggtctctttaaggacccctcacccccaccgctcagaagttgtactcggtactccgtttacctcttcatggcaggaatgcagacacatggccacccctaactgcaagagaggctgggaagcgtggtctctgttctgccatccattcacccagctatatcggtggggagggggttctcatactgcgggacatggcaaatcgcttggaatgccagccacacctggcacctggaagccagagtgagtgttttgaaacttgaatcatttaacttcgttgcttaaaatgatcctgtagcactcactgctcccatgataaaggccaaatcctcatctgacccccagggctgcctgatctcaccgtggctcacctctccagcctcatgccctggttcccccagccccatcctccccaactcaccctaacattgaaattaaaccatgcccactccatcctcaccttgggtctccctttgtgctctgatatttgggttctcttcatgccacagctccacccaatgtgtgctctgcttccttagctgtaaaaggagctccccatagtacccactgggcacataatagggtcacttgcttgggtacaacgtggcgggtgggtgagaaggggatggaagtggtccacaaataatgatttgggagaacacaaataatcagacataaagagccacagaggcacttactgactctaaggactgtggttataaagcccctgcaatgtgccaggttggtactatggggagctccttttatagataaggaaacagtgcatgctgggcggagctgtggtgtgaggtcctgctgcactgccttgctgatgagaaaaaacacttatgggcagagcgctttacactgagcaactctgtgcctgcctttgtctcaggcagtcctctagccattgtgcccccccctttttttttctgagatggagttttgctcttattgcccaggctggagtgcaatcgtgcaatcttggctcaccgcactctccacctcccaggttcaagtgattctcctgcctcagcctcccaagtagctgggattacaggcatgcaccatgacacctggctaattttgggtttttattagagacggagtttctccatgttggtcaggctggtctcgaactcctgacctcaggtgatccacccacttcggcttcccaaagtgctgggattacaggtatgagccaccacacctggcccactgtgccccttttgcacatgaggaaatgggagagggactgtgattctgtaaggtcatatagccaggtagtagccatgccttgactggaacccagctctgcctgccccttccctgctggcagttgcatcacctgccttctctggggagtgaatgaggacaagccacacttgaccttccatggtcctgtagcagagattttaaagtccagcttttagagaggaacgtgaaagcccagagaggaaggaacttgcccttggtcctatactccatcaagcacaatgctgggaagggactcaggtctcctgactcccagtccagagctcttgcacactttgctccttcatgcaacaaatatttattgagcatctactgtgtaccagcacagtgctagcccttgagaacacagcagcaaacacaacagacacaaaaccctggccctgtggagtggacattccagggctgggtggaggagtgggagaccaatacggaccaagtaagtcagctgcagcactgtctttcctcttatttatttccggaaacaaataattatggagaactttattgctataagacagacatggtcctgactctcctacagtgagaatatagtgttggagacaggcactcaatgagagacacataaataagcaaagttcagattgtgatcatagctgagaagaaaacaaggttgaagtgctagagagtaatggggatgcggtactggtagttaacttcagatggggtggccaggaaaagcctctccaggaagtgactcttgagctgagacccaaagcatgcaatggggcccaacagtgttccaggtggagggaacagcaagtgccagggtgcagaagtaggacagagcttggtgggagaaaggaacagagagaaggccaaggtggctggagcagggcgagagggggaggttggcaagagggagggggctggagaaagtccagagtgtcgtggatagacactgaataaagagaagggatgactagccccctacagttcacccctgggtgggggttgggtagtcgtctttgcatctgataatttcccagctagacccccaaggggtgggggccaaacacctgctggcctggcactgcctgtctctgcagagataaagttccctgccccccgttcaccaggaccccgctctgtggtgcctccacctgcacagtcaggcagggcattgtgtgttccggccggcacacctggcattcaccagcctgctggttgcctgatttaggggctcatcctgcctggctcaggggtctgttccctggagtctaccagctgggactaggctggctgaggaggaagacacaggcgctggtggtggccacaaagaaggcaccctttaccgttgcacgcccattggaccatgtttgaaaccccaggcctcccttttccagccatccttccctgggtggcagagtctgggcttgggcagaaaggttcaaggggcagtttcactgctgtgcttagaaattttctctccctctctgggcctgtttcctcatctgtgcaacggaagggttgacctggataaactcatggtgtagactctagagccagactgcctgggtttgaacctttaccacgtagtgaccatatgaatttagctaagttactcaacctttcgttctcagtttacctacatgtaaaatggaggtacaataataacacctatttcaagggctgcgggaggattaagtgaattatatatgtctggtgcttcaaacagtgcctgctctatggtaagtgctatatattttaactctgatcattattattaacgtctttggaaaacattgcactggaaagactcagtggagaaatctgagttcatttgtttgcaaactttttggtctttgtttttaacagagaagctctgcattggtcaggagaaattttactcagagccccagctgttagcaggggattgaaggggggcgcctgccccacctgcttccccgtctctgtgtctgcagcccccaagaggcctactggagcataacttgaaaatccctgctcagtttatctccttcagctcacagtcagggaaactgagactcagagaggagcagggatctgcccagtgagtggcccagcctagactagaacccagatctcctatttttctcaatacaagacaaggggcaggggctaagagagaagctaagaccagaagcctcttaggggactgggtgcattgtgtcgtcaagtcattagcatgcaaatgatatgcaaatgaatgcaaaacagcatgttttatgctaatttgcagagtcgagagcgacgacatttttggtaatagggcggcagtcctggtccctgggcattgccgaacacgcgtcctttttttcttttcttctttcattattatgatcgggcccataaatcttggtttggctgtgactccgccccttcttgcttgaaagcctggctcctatcattctcaagggctcccttgccagtcctctggtccggcctgggcccagggacaggcctgagcagtgggtcagagaaccaggactcaggagccaccagtcagagctagagggtgaccccagctctggcctggaagccacttctgaaggaggggaccgtggcacttcctctgagctcccacagccactgtggcttctgtgccattgtctgtttggggctggcttgctccttttcttgtcagggcgcccagtacctggaacacaggttcaggatgtgtttggtgtttgaagactgaatccatatatggagagctggtggtgtaccctagtgatgagcctgcagtctctgaaaacatgcagcttgagttaaaaccctggcaccactactttctgagaaaatagtagtatgtactcacagctaaccttttgtttttgttttgttttgagacagggtctcattctgtggctcaggcatgagtgtagtggcatgattgcagctcactgcagcctcagccttctgggctcaatccatcctcccacctcagcctcctgagtagctggcactacaggtgcacactgctaccatgcccagctaatttttttttttttttttttttgtagagatggggtcttgccatgttgtccaggcaggtctcgaactcctgggctcaagccatccttctgcctcggcctaccaaagtgcagggattacaggtaagagccatcacaccaggcccatagctaattgagcacctaccatgttccagggctctgctttgtaattgttgtgaacgctgtcactgataagagtatcctagaaggtgagtatcgttatcattgctctcattttacagagagggttaaatgatttgcctgaggtcacactccccagggtaatggtaaaggggtatttatatttactaaggatgagtgcttcatcaggcaggggcctttaaggcactcagcaaagcttctgtcacagggtaccagggtctccacctgtgctatcaagccactcttttgacaatgttaaactttacctgagccctgtgctcctgaaaaacagcgatggtccagaaatccccccaactttttgttttctgaagtctccctaccttttctgttcagggaaatggcttagcaaaacgagccacccttccccatatgactcagataagacgtagtcccctctttctagtgtatcctgtaagactggaggatgactcccttgctggcctgtgatctttccccttttgctggaacctgctgacaaggccaaggccaaggaccctcccacttcccattctttgtctcatggttgattagctgagatgagaactgtgtgtcctctctgaaactagctagacacagagatgaacatttcctcttcaatggactgatggagatatcccctatttgtaagacaatccccactttaaatccctcctgctgtaacctgtctcctcacccctacaaaagtcaaaggcaaatccatcctgtccagacactctgattttgggatctgggatgctctccctgttgcaatagcatgaataataccatcaaccccaattcttccgtgtattttgtctttgaccctttccaccgtgctgttttccacctaaggctctgagctaggtaagagccctgtgaccttggagtacttctcgggcttctctgtaccttaggtttaaaacggatgcgcacaggcgttatgtcctcaggttgtgagataaaaggagacgacgccagggaaacgctcggtcgcttggcactgtgcccagcagcgtgagtgctccagaaatgtcaaccattgtgagtccaggagaggagagtggcgctcagagagggaacgggacctgccgggagactcacagcgggaggaagggggagtagggcgcacgtctggtgacctccgcccccagctgtgggagtgtgccctgtgaccccctcatcctgcctttggatcacgagctggggtcgggggaggggatggtgggggggacactgctcggtcctccactccgtgtgccctgtgaccccctcatcctgcctttggatcacgagctggggtcgggggaggggatggtgggggggacactgctcggtcctccgctcccctccgcccgcctttgattgtggtgagcagcgagtcgcggagcaaattaacttttcgcacacttcattatgcgccgtcccgcgtcccccggggccgaggcccgcgcccccgccccgcgccgacaacttgattgggcaattaatcttcgcgccccccacaccccctcccggccccgggcctttgtgcgcccgagcgtgggccgtgggcgccccccgggccgcccggtctgctggcgcagataaggcgcccctcgccgcgcggccccgcctttgtcagggcgcccgcaggcccggccgccgcgctgccgtctcgcaccccatccgcgcgcccccgccccttggctcggtccatctgtttgagcttcacaatcctccagcggccgggggctgggggcggggtctcgctcttgggcaggcagccagcaccccctccccccggcccccccacccagcccccagacacgcgcgcgcacgcccactcgcacgcggggccgccctgtcaagcagtgcggtattaattaagaaggtgggggggaagcacagcagcagtttgaagaattgtggggcggagggttcccagcggtgtccagaaaagagggggaccctgccacccatctcgtaccgcaggtgcttaacgcctggttattggcttggggatctacaggctcccatggctgggggtgggggttaggggaggtgggaggtgggagggagaggcctgggaatttgcctgacagtgtctctttgtgcatttttctggggttttgccagcagttgacccagcctcagaaaggtagcctgtgattcaggtagtgttgaaaaccagaggcccaaaggcaggataaatctgggcctattttagaggccaatagcgtggtggttcagaaaggggttccaacagttctccctactcgccgttgaggatttgcgtcaggtaaccaccctgcgcccggggcggtggaggtgatgggctgagaccgtgttggcgcagtgctgggtacacggtgagtgctcacaagtgctggttcttgctgttttctgtgattttccttggaggggcacagggaaaaccaaaaatggctggtgctggaaagaggcccttgagtttcatctcacagctggcggtagggtgaagcttggcaaaaaacctgtggtctgtgctgagcttggggctgggtgtgtgtgtgtgtgtgtgtgtgtctatggtctttgagaagtgtcttcatcagcatatgacttgtgtgagtttttgggtagagaaggcacagccttcactagtttctacaagaagggtgtgatccagtgtgcgaagaatccctgtgtgcagggctgggaaatcagcttcatctcttccatccaagaacagcatggctggcacgcttattgtgtgcggagtccacggtagcgtccctaggtgctagggacaaccgtgagcagagcagagttcttggctgccttcacagactcgcagtctccttcggaagatgaatgagaaataaaataaacatgtaagacatgaggtaggtcactaggtgacatgagctttagataaaaacaaagcagggcacctgattaggagggtgggccctacttgccagacccctaccctcatccccaatacagtgtgtatcattgcctgggcaggaaagggccacactcctgggtctagggaactaggtccctaagtagcctcatgtccccacccactaggacccagcctccagccagttctgttgcatggggcagggtccctgggaagatgggcaggcctcagactgctgcaacctctgcccctagccctgaggtggtggcagtagtgtttccctctgataatgacatactccagtcttgcatgaccacgatgcctcatgagcccacagtccagaaggggcctggtgagcaggagctgaattaaaatggaaaatacggcctcccttccccccttcctgttcctccccacttactcccttcattcctgctgctcctgaagccatgggtgaatagtttctcagtctctttgccttgctgagctgggttagttgggttagcaggatggacatctccttatggatactagagttaggagacacccagaaccagcaggtgggattttagaaagtgctgtttggctctgaccaacccctactcccaccccatgcatagcagggttagtttcctcatcaactctggtctctgattctgatgttctgcccctaagcatcctacattctaacattgtattcttctgactttttagaattttcccatcctatgcatcttacacgaatatggtgaagttctgatttccgcccttatgttctagattgagtcttcagtattaattttgttggggtctacccattcaaataacaatagagaaagactatgtgcagagtcacataatactagtcatgatagtagcaattaacatccttttgaccttggttttatttaacagtttttttttttgagaattttctaagcgccagacaccattctagacattatacaaataaatagataaaaatgaataaataaataaatgttattttagaaggtgcaattgaaattgagagtcaaggcaggactcactaagaaagtgacaatattttctttctgctttcagttatggagatttgaaatctcagttgataaggtggatttatttctccttgcaggtcattcactttttccttcatgtattttgaatctctgctattgggggcataaatatttagaattgttatatgctcatgattaactgaccttttttttttttttttagatggagagtcttgctctgtcgcccaggctggagtgcagtggcgcaatctcgactcactgcaacctccgcctcctgggctcaagagattctctggcctcagcctcctgagtagctgggattacgggtgtgcaccaccacgcccagttaatatttgtatttttagtagagatggggtttcaccatgttggtcaggctggtctcaaactcctgaccttgtgatccacctgccttggcttcccaaagtgctgggattacaggcgtgagccaccgcacccagccttgacctttttaatcattataaaatgaccttatctttcctggtaatattctttgctctgaaacaaacattgtctgatatgaaactagctactcctccagtgttattttgattactgttactttccatctttgtacttttaacttgtgtgtttacacttaaggtgtgccgttttgaaggttgggtcttattttttttttttaaaaaaaacaatatttgggtcttatttttttaaaaaaatccaatctaacaatctctgctttttaattgagggtatttagaccatttacatttgatgtgatcattgacgtggttagatttaagtctatcatcttgctatttgttttatttttgtcccatctgttctttgcttcctttttcttctttttctgtcttcttttgtataagctcagttttttttactatttcattttaactcctccttttttattatatcgttttaccttctctgttggtttattaactgtaatgttttgtttgttatcttagtagttacattaggccttataagcctgggtacggtggctcacacctgtaatcccagcactttgggaggctgaggtgggcggatcacctgaggtcaggagtttgagaccagcttgccaatatagtgaacccctgtctctactaaaaatacaaaaattagccaggcatggtggtgcatgcttacagtcccagctactcgggaggctgaggcaggagaattgcttgaacctgggaggcagaggttgcagtgagctgagatagcactactacactccagcctgggtgacagagcaagactcaaaaagaaaatcatgtaatagtatactttcatttccttcctggccttcttgctgttgttgtcatacatacatatgtgtgacagactccacaaaatgttattatttttgtttaaatgctaagttatctttttttaaattaaataatcagaaaagattttatatatttaactcatgtagttaacacttctggtgacctccattcccttatgtagatccagatttccatctggtatcattttccttctgcctgaaggatttcctttatcacttcttgcagtgcagatctgttggtgacaaatgcattcagcttttgtatgtctgaaatcatctttatttcatcttcatttttaaaagatattttaactgggtatagaattctagatcggcaggttttttctttcattagcttaaaagatgttgttgcttcactattttcttccttaaattgtgtccaacaagaaatctgccattatccttatctttgtttctctatactttacaaggcttttctttctctgactgtttttaatatttatctgtttgtcactggttttgagcaattcgttcatggtgggtaatttccttcctgtttcttgtgcttgaggttcgttaagcttcttggatctgtgagtttatagtttatatcagatatgaaatattctcagccattaattttctatttcctctcctttggggacttcaaagacacatatattaggcttcttgaagttgttccatagctcctaatactcttggttttttggattctttctttttctctgagtcgtcgattttgggtagtttctattgctacatcttaaaattctctaatcttttcttctgtcacatcagcatatttttcatttcagacatgtagttatcatttctagaagttcagtttgggtcattttatatcttccaagtctctccttaacctttgaacatgcagaccatgaaatacaatttgaatacttattttaatgctcttatctcctacttctgtatcagttctgggtcagtttcaattgattgattattattcttgtatgggccatgttttcttgcttatttacgtgcatggtaaactttggatgccaggcattgtgaacattacccttgttgggtgctgtacacttttatatttctataaatctccttcagttttgctctaagatgcaattaagttacttggaaacagttttatccttcctagtcttgcttttataatttgttgagtgggtccagagcagtgctatctgttgagggctaattatataccactgttgagaaaagaccttcctgagcactctacccagtaccccagaaattatgagggttttttctgtttattaatatttctggttttgtgtgagtgctgagcactgttctctaatcttatcagatgattttcacccctacttcagtgtagttttatcatacaaaagcaccaaccagtactcagtctaatactcaagggggactttcttcatatctctggaatagtctctctgtgcaactctttcctcccaatactgtgtcctgcaaactctgccctctttgtccttcctggactctcaactctatttccttaactcaggaagcctcctgggtgctgcctgggttcctcctccctgcactaggttctgaaaactctctccaagcggcaaactgaggccatgatagggttcatcttatttcccacttctcagggatcatgatcctttattgcctgttgcctagagtcttaaaaattacagtttcatgtattttgcctggtttggtttgtttgtttgattgtttcaagcaggagagtaaattcagtttctgatactccatcttgggtggaagcagatatgagaaggtgacatttgaacacaaacttgaaggagttgatggagtgaaccaagaggatatgggagtggggagaggaaggagattctaggcagtgtgaacagcaagtacaatggtctcctgcgtgtatagctgagagtgcgggtagtgtgtttgaggaaggaagggagcacgtatggctggagcagagagttatgtggggaaagtggggagagggagggatgaggtgtcagcttgtgtaggaccttgcaggccatggagaggattttggcttttacaccaaatgaaatgggagccatgggaggattttgagcagagggaggacatcttttacaggatctctgaatcgattggattaactgaaagggataagagggcaagagagaaagccagagacttgctgggaaccagtgcactaagccaggtgaatgctagtgactcagacacatgaaaggacacactaccaagggggtgaataactaggagcggggatgaaggaggcttctggggtgctgtcggtgtcttgtatcttgatctgagggaggttacatcatctgctcactgtgtgaagattcattgagctggatgtacacgtctaaattgtgttcacaattgaattgaatacatgaatatattactatataaatatactatatacatataaaacttagaaaacaaagtagggagatgaaggtggcttggactagactgttatcagtggaggtgggaagaactgtatgcattctagatctcttttatatgtagatccaataagatttgcaaacagatctaatgttagatgtgaagacagagaatagtccaggataatgtcaagttctctggctgagctacagcaaagactgaggacctgctgtgtaccagagcttgggctaagctctattaacttctttaatcttcatgacaattctaggaagtaagtctggcaagagctgcttctgaggtttttgtggggctactgggagcctttccaccagaagtgtagtttgtgtgatggattccagaggtagtggtggccacctttgcctccatgaggttacaggctgcctgagagtgaggcctacaagaaagaaatcaaagccatgatagagagagagacaggatcctcacagtaacatgtcagcacctggattcagccataacagaagccagtgccctgggcttctcagttatataaattaataattacttttttttttatttctttcacttctaactgaagagtccagactgatacaacttcttcatatgtgtcccctgtctgcaccatccaatggaccatcaacagcagctacatcctctccttaccgttgcttgcttgctttttttgagacaaggtctctttctgttgatcagactggagtgcagtggcataatcacagctcactgcagccttgacctcttgggctcaagcagtccttctgcctcagcctcctaagtagctgggtctataggtgcttgccatcatgcccagctatttttttttttttcatagagacagggtctcactatgctgtctaggctggtcttgaactcctggactcaagaaatcttcctgccttggcctcccaaagtagtgggattacaggcgtgagccaccgtgtttggccgtccttaccatttctaatgcctgctctgcactttctctctctggacctttgctcctacaggtcctcctttccagaatgcctttcctcccttaccttctgccctcacatcaaaaccagccccctactcaaagccatcctaactccaccagctgaaggatggagctggcagagtgcttagatatcaatccattttacagatgggaataccaaggtcactgtgagacagggcagatttgtggtcaggactcccgcgttctgactctctgagactctttccatgatcctccaggacagccttttctgtgccctcccttgcgtggggttgaacagtacttttcacaacaatttacactctcccataccccaacccttgcacgtgctgtttcctcagtctgggatgccctattccattctgtccttccggaaagggtgccacttgaacttggagattcaactcaaggatcagacttccagaagccttctctttttcccagggtggctctgtgtcctgcctggtactcccacagctgcctctggtacctccatgaacccatttatccatttgttttttaggtgtctgtttcttgtttgcctcacctgttaggtaggggaactgaggcagacctcctggccaaagaaggctcccaactgatgtttgtgaatcaacatagagtgagaaagagccccgtggagtggggcggggggtggagagccagcgctgggcgtggaggcaggacgcctgggctccagtccagccaccaccactctagtgtgtggcctcatgcaagtcatgtcctctccttgagcctcaggcttttttggcagtaaaaagggcagaacatcatagtagttaatacctcaggcagcctggatttgaatcttggctgtgtgactttaggcagtttactccagctctctgtgcctgtttcctcatttgcaaaatgggggcaataaacatatctgcatcatagggtatttgtgagcattaaatgagttaatgtttacaaagctttcaaaccatgcttgcttggcacatcatataagcatcccagagtgagaaccattaaacaaaagaaacccttcccttcctgagaggagaggagagcttgacaaactctaaagtggcgtgtgagtgaactatggtcactctcagggggtaagctgcctggaaaaggctgactctgacactgactagtgtgtgtctttggagaaatcatgtcacctctctgggactcagcttccccatctatcaaatggaggagttggtctagcgcagttggagttaaagtgctttgtctctttgagttttatgtccatgtcagtagagtgggctgagagctgcatgtctgtcatgcgctcctggtgagaatgaaatacgatgatgggccggacgcggtggctcatgcctgtaatcccagcactttgggaggctgaggcgggtggatcacttgaggtcaggagttcgtgaccagcctggccaacatggtgaaaccctgtctctactaaaaatacaaaaattagccgggtgtggtggcgggcgcctgtaatcccagctacttgggaggctgaggcaggagaatcgcttgaacccgggaggtggaggttgcagtggaaccaggattgagccactgcactccagcctgggcaaaaaagtgagactctgtctcaaaacaaataaataaaataaaaaatataataataaataaataaatacaatgatgtctggagcacttgccagtcatgcctgccacatagcaagtaatctgtcataactgtcactgttattctggccctgacattccagggttccttgaggtggggcaggatgagggatgggctgggcatcatgaaggaaggtgctgatgtatcacctactgacagtttagaaaagggaaggcagccatgtgacccacaggcagtgtccccctgcctgagccttatttgcagggctgtggcatcggtgagcaggacagggaccaccacgcccactagagaaagaagcacgtgctgcttttgtgagttcacaaaggtcttggttttccagggccaacagtgtccccgccacacgtgaccacctcagaaccatcacctgccacctgccagggcctgggagttggaatctgaggtggaaggagagagcaggggccaactcctggctgctcccctctcttggtatgtgaccctgggcaagcctctgcacctctgtcccctttgtcctctcttgtcacataatgaggttttgagtgtcttagatagggaggatgtctccctatctaaggataggataggatagaaatggccaggccctggtgcctctgctagctcagtctggctgggacgacctgggaagaacatggcctcagttccaaagccaaggcggctcctgggggagctgcagctggaggctgtcagcttgctgccctccttgctgctgaaggacaagctttttcttgaagataggatggataggatgtctcctatccatcaggagatgcgattattggcctagactgggcagggtctccacctgggcgacgggttgggaggcggaagtgaagctggtggcatgaaccattctcagtgacctttcaccagggtgagtgggaagtagttgggagcatcgaggcctcactctccatcctgaagatggagcacagactggctggctgaggccgggagctcatcacgggatggagacagattggcagacaaagaggaggcgggcggttggggctgggtgcccctggggaggaaggcggggagagagcgtaggagcaggaggaaagaaggctgggcttatgtgcagcctcacagactgggcctgcagagtctccagctggaggttgggactggaccttcctcctgaatgggcagggagggaggcttgttggcctagccctcggggttcttgaaataaatgagggagggccttggggggtggtaaattgctgaggctgtgataaacattctccccttcccacaaaacacacacaggcacgtgtgcgtgcatacacatacacacacacaccctggccacactgctgtgcatatcttactgattgttgtcctctgtgacagcagttctccaagttgagtgcattggaaggatcagttaaaatgcagatttccaggcatttccatctctaaatgtagggtgtggcctgagaatgtgtatgtcttacaggatcctggttgatgctgatgctgggggttctgggacacactttgagaaccactgctccattgagcagcctttcagtttgggtgcccctcggtgctggtgctgggagagagttaggagggcaagggggttagtgagggctgctacctgtgaaacacaaagcaggagggaatggaattggccaggagagcctcagaccacagcccgggcctgcagagtcaccctctaggggtctctggagtaaagattatccacagagaagccccacatggggcagaaatggccaggccctggtgcctctgctagctcagtctggctgggacgacctgggaagaacatggcctcagttccaaagccaaggcggctcctggaggagctgcagctggaggctgtcaccttgctgccctccttgctgctgaaggacaagctttttcttgaagagagactgtgtcccatccacaactgccccaggcatctaccacatgccaggctctgtgcagagtgtttacctggatgaatgcagtttcagatcagagcaacctggccaagcaaatataatcgtccccatctaatagatggggaaaatgagggattaagtcatctgcccagtggtggagtcaagatttatcccctcttgtgccttagcactcatccctgtcagcttccctgggtggtgaagaacattagctccttttacacctgaggaatctgaggtgtggagaggtcagtgacttgcggtagaggtgggtagaggatccgggattccaaccctgctcatgcccctctttttaaatttcaagatgctgtcccttgagtacttctagggggatgtaatggcagaaacttggggctggaagaagcctccctggcatttgacaggtgggtacactgaggcccagggaggcaatcagccgtgcctcagtgcctctctctgccctgaaggggctccctgttgtgtgtggggtataacccccccgtaattcatgcattcagcacacactggtgggcacccattgtgggtcagtcccccaagccagagtactgttggtgagtgggaaggcagacgtgggtgcagagggtctgtgcagtgattggggatgcactggggattggagggggcagttgacatgtgtggggtgcatgcagggaggcttcctggaggagatagtctgagagaggaggaggtgagaagggtactcaaggatgagaaaagaacagaaacaaaggcttggaggtgggggaagtgatattgcctttaggaaattgatagaaaatctgtagctgagatagtgtggggaaggtatggccagaaatgaggtggaaagtggaagcttggcctggggaagtggtggaaagctctggacttgaaccatgaccctggttctgttcaaggcagggctactctctgcagggctctgaattctccagatttccctcttacctttccgaacttcctgcggtggccaacccctaaaatagcccccagtaatctttgagtcctaataaccagtaggattttgtggaaatgacagagtgtgacttccaaggctggatcatagagtgtgttgcagcttctgccttggtctctgggtttgatccccccggagaagccagctgccgggctgtgaagtcactcaagcagcctgcagaaaggccacatggagagaaactgaggtcctgcctgcagccagcatggacttgctagtcatatgactgagccaccttggaagtggatcctccagccccaggcaagccttcagatgacagcagcccagaatcacctagccaggcctgttctatattcctgacccagagaaactgagacacactaaatgatcattgtgttgtacgtcactaagttttggggtcatttgccgtgcagcatcagataatgagggcttctctgtgccctttcttggcttcttctgttgcttcagctgccatctgatgaaagtctgatgaaaaccaaaggccctcctccagaaaagttcaggtacacccagaaagaaatgggggtgcaatttcaaagggatcacaggccatctaaaactaaacctcagaccttcagatcccggcccccagtggacatggaacctgagtgaggaatgaacagtgtctcagttgctgagctgtgggacatggtggctgctgcggggtcttcagcttggtcatggcagggtgcccatggcctacattcctttctcctcctcttctctgtgtccttggcaggctgcccctgcagaggaggaccgtgggtgcccagactgagtaggtaagtttagctctaagagaacaggttgagagagcccatcggttgtgtacaggcaacttctcagccaagctctgccagttgctggtgttcatacttggctgatgtctccacttcaatacagagcctgcaggggatgcaggctgtgaatgcagtccctggaaccagactgtgggctcagccatgagacctgggggatgtacttcaccttcctgacttgggcttttcaacttggaattggaggccagaagtccaccctgaagcgtggctgtggggtggaaacaggccctccagcagggcaacagcaggggctccttgcctggcagcccctccggttcttcagcccttagcctcccctctctggctgtggtcagtggctggctcaccagcccctcttatggcagtcactgctccagagtgccaggatttcccagtatggtggccagggctgtccggagcccagcacgcagctcaggaagcagctcaatgcaggtgggacgtcagtgggagcagagggcagcctccctccccagacccctgaggatgagtctgtctccctccttggtgctaacttctctctccttcttacatctccacttctttcttcttcctttatcttctctacctccttctctcttctaccttttcccttcttttccgctttttccttttttcatcttcattcttctcttttctttcgtctttctcttcccctttcctcctctctttgtctagtccttcttccccctcacctctccttttcctcctcttccgtttcataatgattaagagtatggcttctgatgtcagcctccctgggttcgaatccctgctgtgccacacactggctgcgtggcgttgggcaagccacttaatttctctgtgctttggcttcctgagctgtacagtgggatgctaacagtgtctctcttgaagggtgccatgggtgccaggtgagcgttagctgcttatcattcgtgttccttcctcccctcctcttcttctcctcctggtcttagaagtctgtctccctccctctctccaagccctgtgactcgcctcttacgtctctctgcccagcatcttgggcctgtctctggcccctgccctgctgcttcatcctctcactgcacgcacaggaaggagagcccaggcctggggccaggttgccccatgaacagttgctgagccaggtggctggagctcttccctggggccccgcccacgatgagttcaggagctgcctttgtgcacccgtgacagcctctcctggcgcctcatttggcagagctgtgcatctggcccagttactgtggtagccttggaaggcagagtgctctggggcttccttgtcatctacctgcgtgaccctgcatgaagggtatgcccagccctcagctggactgccagccccacaggcacccttggtgcccaccacacagcaggagctcatccacagatgggcacaaatagtgataccagacagtgcctctgagtccttgctgtgctaggcactgttctaagtgcaaattccgttcatcttcacagcaacccttgcagtgggggctgttaaccccattttagagatgagcaaactgaaacacagaaaagcataggaaattgcccaaagttgaatgaatgaatgaatgaatacaatgacaacttaggaaggaaggcattttactgaagagtgacaggcccacggtcacacagatagtaagtggaaaaaaatcagggctggaactcatgactccaacatcacctcccacctgtccataagcccagtgacagcaaggctggcactccctcacacttggggttgaggccagtaagagctgcatttgtggaacactggccaaagcaaaccctctgtgctgagggcacttcagccagtgtctcaagcctgtctgcacttcttcttttttttttttttgagacagactctcactctgttgcccaggctggagtgcagtggcgcaatctcggctcactgaaacctctgcctccccggttcaagccattctcctgcctcagcctcctgagtagctgggattacaggcacgtgccaccatgcccggctaatttttgtatttttagtagagatggcattttgccatgttggccaggctggtctcaaactcctgacctcaggtgatctgcctgccttggcctcccaaagtgctgggattacaggcgtgagacaccatgcccagtcaactgaagttctttgagagtactgttcccattttccagatgaggagcctgaggcccagcgaaggcgagcaacatggccaaggtcacacagccagtaggtgtgattccaaagtcccactttctgtcttccatcaggtagtactatctgccttccactatggagggaatgtcccattgggagacgcctaggatgggggctaaagaaagacaggcaggcccgacaccagcctctctctcttctgtctgctgtcaacactatatcttggtgccattctgcccactatttgtagagaggcctgggtaccagcctcttcactttgtcctggaggccaggccaggcaaggatcactgtacccacttttctttccttccttccttccctccctccctctctttctgcctttttattaaggtataaaccacacaaaataaagtacatagagccaggtgtggtggctcacgcctgtaatcccagcactttgggaggccgagggaccccccagccaaagcctggagctcagaacacaaatgctccccttgttgagagtggggaaaaaaatctcttttcaggtgccagccttaaaaagaaagaacaaaaaaggtaactcacagatgaccgtgatatgtgacgtgcatctgagcccttcacacaaccacagaactaactgtctgcagctgccacaacagctgacccctctgccaggcagagtttgctatcaaccagtaacagctcccagaggttttgttatccctctgtagaaatggaggcttgaggccaggtgcagtggctcatgcctgtaatcccagtactttgggaggctgaggcaggcggataacctgaggtcgggagttcgagatcagcctgaccactatggagaaaccctgtttctactaaaaacaaaaaattagccaggcgtggtggcgcatgcctgtaatcccagctaccagggaggctgaggcaggagaatcacttgaacctgggaggcggaggttgtggtgagccgagatcgtgccattgcactccagcctgggcaacaagagcgaaagtccatctcaaaaaaaaaaaaaaaaaaaaaaaaagaaatgaagtcttgattgactgaagtaggaggagccagcgcacaggctttggaggcagaagagctgggaccagctctggaggtttgggaacatgactccacctccccgagcctcgtactgctgaccagattgcttttgcaagcattgtactacatcttcacacaatgctgggaggcagctgttaccaaccccatcttacagccggagaccctgaggctcagggaggtaagggatgtgtgcagagacatgcacaaagtggaaaaatgtgaaaacagacctcatcgtgcagtgttattgtgcaatttgaattgaatgagggataagaatgtgaatggatgcagtccacagtaggtgcttaagtcttgcatggggtctaatagccggtgagtggcaaaaggagaacttgtacccagatctgcctcaccccagagcccacctctgagcctcttcatccatgggaagccatcatcagcatggtgcctggcaccgagtgagcctttgagaaagggtaactgggtcaaaaattattttcagaaagttgaaaacatggatcttatacaaatgtatagtgagcacatgtcaaagtgttatttaactcattaaggatggaaccggtaggatggcaaagctgactcaaaggaggataaaatggcaaagttagctacgacataggttaatgtcttacagggcaccaaaaccataagctttagcgttatttcttctacaggtcagaaatcatttgcaactcgtgcactttttacaagttaccaggtaactttgcttaggatcaggtgacccaggctcatcggacactgccttcgcttgatattgaaagggcacacagacaccctttttgtcttatttccaagttttggatattttttctttacagttattatcattccacttctctctgacgaaaggctgttcacaggcctcacaggttcccaggagcccagggacacgcagaccccaccccacccattcacacaaggactcaaggacagagcctctacccacagatgaacttgggtggtgcacaggcacacgagcttgatggcagggcacgcccaggctgaaggggccgggtgggagctaaaacgtgtggtctatggtagcccagcctctttcctcagcaaccacgccatgaaaagatccctacattatttgtcaggtaaaataaagcgacccgtagctagtggcgcgagattctatccagcttaatacgtgtgtatgtgcagacacatttatgagtgtgcatgcagagaaaactctctggggaaataccccctgaactgacagccatggggagtgagggtgaagcggaaacaatcttgtaaaagaaattcaaaaaccgaagcccactgcattgtttaaattggttacgtccaacttgttttcctgtgttatctgtcgcctgttaatacacacacacaaacacacacataatagaatgggatagaatatctatatatatctaatatatataatatctaatatatataatatctaatatatataatatctaatatatataatatctaatatatataatatatatatagagagagagagagagcgagagagagagagagagggagagacggagtttcgctcttgttgcccagactggagtgcaatggcgcgatctcggctcaccgcaacctccgcctcccggcttcaagcgattctcctgcctcagcctcccgagtagctgggattacaggcgtgcgccaccacgcctggctaaattttttttttttttttttaatttttagtagagacggggtttctccgtgttggccaggctggtctcgatctcccgacctcaggtgatccgcccgcctcgacctcccaaagtgctgggattacaggcgggagccaccgcgcccggcgggatattatatttccataaggccctccgggggcctgggaacggactggtgcttgcgtgcggggcttttccactggttcccttccgtactcgggcttcccccgctgttgttactccctcaacgggaacacaactccaccgccgcctccgggacacacccccgccgcgtgggccggggtccgggacgcgcgctcagctcggccccgcgggggcggcgcaggagggaagggggtgcggaccccggaggcgccgcaggaagccctcgcccacccttcccggccgggccgggtccgcagctgacggtgggggtggggagcagacgggcggggcgccggccggcttgggggtcccctggtcccgtccagggggctcgggccgactccgggccagctgcggaggcgggggaggggaccccgctttccatggcagtgccgaggcggcgcgcacaaaggcgccgcgatcagcgcttcatcggttcgagtcaattatctgaggcgcggaggcggcgggcggggcgaggcgattccccggtggggctgcggagcgcggcgccgagactcagaggagggggcgctggggaagcggcttctccgtctcctgctccgccccgggcttcgtggcgaggcgccgtcgccccctggtggggcctcatccattcctcgctcactcgctcgttcacctttttctcaaccttacagcgggtggctctacggtacgagctgagggtgaagtgctgagaacagggcaagcgggccgtacctttaaatgccctgtcgggagctgggcccctctgagtggccaacctcaccaggaaagggcgctcagcctcgcgctgcagatggacttggaagcagaccgtcagaatgcagccctccctgcacgtgatagagtaagggccgcacaggggatgagggcccggggaggcccttcgggagaggaagagtcccagatggctctctggaggaagtctggcctaagatgaccaggtgaaggggtgggggtccagggagatgagggcgttgcaggtagaggtttcagctattgcaaaggggttgcagtacgggcaagtaaggtgcactctggggagagtaacctgtacttactgtgcgaggggaagggaggtgatcagtgaggtaggtaagtgggccagggccagatggcacagggccacctgcaagcgtgggctgagggtgggttgtcaggtcgtttcatcatttccagtttatccttctcccctttagatttggagaggatttggctgccctcacccttgtaagggtttaggcatcattcgcccttgactcctgtccagttgtctcactggtctccctgtatcccttattttgcccttcaatctgcctgcacccatcctccaaaatgacctttttaaaagcaaagctcggtggcactacttttcaaaatcacaaatgcacaggatctgtaacctgctggttgcacatgacagaaaccgcataataatcatgggttaggccgggtgtggtggctcaagcctgtaatcccagcactttgggagcctgaggcaagcggatcacttgagatcaggagttcgagaccaggctggccaatatggtgaaaccctgtctctactaaaatacaaaactttgctgggcgtggtggtgtacaccagctactcaggaggctgaagcacgaggagaatcgcttgaacccaggaggcagaggctgcagcgggctgagatcacaccactgcactccagcctaggtgacagagcgaggctccttctaaaaaaaaaaagaaaataaaaaaaaagtcctggtgttagaggcatttttcttttcctcctcctcctcctcctgctcctcctcctcctcctcttcttcttcttcttttctgagacagagtctccctttgtcacccaggctggagtgcaatggtgtgatcttggctcactgcaacctccacctcttgggttcaagcgattcttctgcctcagcctccagctaatttttgtatttttagtagacatggggtttcaccatgttagccaggctggtcttgaactcctgacctcaggtgatccacccgccttggcctcccaaagtgctaggattacaggtgtgagccaccacactcagccaatagaggcatttttctgtcatgtaaataaagtctaaagcaggcagtctaaaactggcatggtgctctacggttcaggaacctaaactccttttgtcttattatgctaccccctcagtacatggtttccacttcatggcccaacatggctgctcaaacagcagccctcacatctgcatccccagatggagagtctttttttttttttgagatggagtctccctctgtcacccagcctggagtgcagtggcctgatcttcgctcactggaatctctgcctcccaggttcaagtgattcccctgctcagcctcctgagtagctgggaccacaggcacgtgccaccacacctggctaattttttgtatttttagtagagatggggtttcactgtgttagccaggatggtctcgatctcctgaccttgtgatccacccacctcggcctcccaaagtgctggggttacaggtgtgagccaccgcgcccagcccccagatggagagtcttttagtcattagaaaggagaaaggagccaaggagggagggaggttcccttaaagactctttcggaagtcacatacaatcttcttgttgatgttccattggctaaacttgatcacatcactacactaagctacaaaggaggctgagaaatatgatctgtgttctaggcaccatgtgtccagatgaaaattgaggctcttatttcaaagaaaaagttcagtccatggccaggcgtggtggctcatacctgtaatcccagcactttgggaggccgaggctagtggatcacctgaggtcaggagttcgagaccagcctgggtaacatggaaaaaccccgtctctactaaaaatacaaaaattagccgggtgtggtggcatgtgcctgtagtcccagctgctcaggaggctgaggcaggaaaattgcttgaatttgggaggcacaggttgcagtgagctgagatcacgccactgcactccagcctgggtgacagagcagaactctgtctcaaaaaaaaaagtatcagaaaaagcgcagtctggatattgggaaatgaccatcagtctatgcatgctcaggagttccatgtctagcagtgtgtcctataggtttgcttaacccatgtgacatttgacacgtttacaaggttattcactgcagcattgtgacagcaaaagactggaaacaacctaagtgtcctgtaataggggactggttaaacaaattatgggacatttatacaatggagaatgatggccacaaacacacatgaggaaactctcaatgcagtgatatgaaatggtatttaagatgtttcactttggaaaacagtttggcagtttcttatagagttaaacatacatctctcctatgacccagcaagttcacctctaggtttttgctcaaaataaaaatatatatgtatatatagctccacaaggacttctatgcaaatgttcaacagagtttaacatgtgatagacaacaattggaagtgacccaagatcgaacagccaatgaatggataaactggtgagtcaaatattacactggagtttaaatgagtgatccaatgtctgcaaccacatggatgaatctcaaaacatgctgaatgaaaacaagctggatacaaaaaatagcatgttgtaatgatgccgtttatatgaaattctagaagaggcaaaacagaccaatctatgatgacagaaagcagagcagtggctgcctctggggtggagggatggactgggaaggagcataaaagaatttcttgggatgctggaaatgttctgtatcatgattggggtgttgattacacaggtgcatttcactgcatgtaaattataccttgatatttttaaaaagcagggtgcagaacaatgtttaaattatggaatccggtatgtttaaaaagcaaggaaatttgcttgtatctgcattgactgtctagaagagacttgtaatagtgattgtcggtgggagaggaactgggtagctgggggctggggaaaagggacactttgggccataccctgttatacctgttgaatcttaaaccagttgaatgtactacctaattaaaaactaaaactgaaaagatcagttagatgcacacgtgacatcaccacattcatgttttaaatctcctaatggctcttcccggcaatctggacgaagttcagactctgagctgtcctggccttatgtggccccactcaggcagcatcctctccaaccacttttctgttccctgcagagacagctcagtgcctggctccctctggttggcctaagtgcatatgtgccattccctgagtgctcagctcctcggtgaattctccccagccccctgcctgagttggtccctcgggtctcactggacctgctgcactttgccttcccccttcctcatctatcagatcaacacgtgtttcccagagctctctgtgagctggaccccagagtcctggagatgtgtgggagccacttttatgggggaacctgcttccttgtttctgcttcagacagcaggcttctcctgccctgagactcccagcagcgtctcctcttcccaggcccagatctggcctggggtagaaactttgataaaatgtgctgtctttaagttaaatatggctccataaagaatgcattccatgacaagaaccaacagagccctggtttcttagaagatacagagaaaacacactgttgtgggagaattgtgtctgccaaaaagatacatcccagctctaaccctgggacctgtgattgtgaccttatttggaaacagggtttaggcagatgtagtcaggtcagggtgaggtaatactggattagagtgggctactccaatgactggtgcccttaaagagggaaacagacagaggagaacaccacgtgaccacagaggcgaagatgggagtgatgcatccacaagccaaagaaggccaaggaggcttgcagtcataaaagctggggagaagcgaggaagtgtcctcccttagggctttcagagagagcatggccttgccagcaccttgatttcagacttttagcctccagcactgtgagaatacatttcagttgtcttaacctacctggtttgtggttatttgttctttttttaaattttttatttatttatttatttttgagacagagtctcactctgtcacccaggctggagtgcaatggtgtgatcttggctcagtgtgacttccaccttctgagttcaagtgattctcctgcctcaggctctggagtagctgggattacaggcacctgccaccacacctggctaatttttgtattttcaatagagacgtggttccactgggttggccaggctggttttgaactcctggtctcaactgatccgcctgtcttggcctcccaaagtgctgagatcacaggcatgagctaccgcacctggcctgtggttgttaactgtagtcccaggaaatgaatacacacacaaaaccagttaatacctaagacaattccagctagtggcaagtgctttggaaaaacaaaacaaaacaaaacaaaacaaaacaggtgagaagggcgtgggatagagagggactgggaacggtgccacattagccagggtggtcagggaagccctcttggaggaggaggcatttcagtggagaggagaagcccagcatgtgaggaccaggcagaggtgctggtgagggggcacttggtgggcgtgaaagctactggatgcagctctgacgatggaggatacctgactgggattttggaggaagtctccaggaatgaaccgggaaggggctatcctctctttgcctctgcaggtctcagaacctgctgcatggctgctgcaggctgtccctcggcctaggccggctggcagccgatgaaggaggccagcctcgcagctgacatgctgctctctaattgtgattaactaccaagtcctctcctgctccggcctgaggccgctggtgtgacagctgcagagtgaatcaatgaggccaggaaggggttaatgggcagcccctccatctgagcccttcagacaataaggggaggtggggaggcctctggtgggggtgtgtggcatcagctggggtgagtgaatggaggggacagaggccttgtccctggggacagggtgtgagtgctctgtggggagaggggtcagacccccctcccattattttcatccacctccatcgtcctctcccctcccccacccagccagagcatcccagacaactgccctcttggctccaaagtgtgcagcatcttcagccttacggaattctgaagcagaaattctaaaagccaaagaactgcagaatcgtgacatgtcaccgctgtgggagagtccgtctagtcctgtcattctgaaactttcttttgcagtggaacccacaactcccaccccagctcatttccccccaaaataatagtgcattgataacattgagaacagaccctggtaccagccggcctcattcatccttcattcagccccggttctaccacgtacaactagggtaacttgggggtataatgcatagtttataggtgtgtgtgtgtgtgtgtgtgtgtgtgtcttccctagagacagagtcttgctatattgcccaggctggtcttgaactcctgggcacatgcagttctccagccttggccttctgagtggctggctcacaccaccgtattcagtagttccgtaggttttgacaagtttgtaagttatgtaaccaccaccacaattaatatatagaacatttccatcgctgaaaaatgttgcctcatgccccttgtagtcaatacccttccctgtgttacctgatatggtagcatgaataaaggtcatctagagttagtgactctaggccgggcagggtggctcatacctataatcccagcattttgggacgccaaggtgggtggatcacttgaggccaggagtttgagaccagcctagccaacatgacaaaaacccatctctactaaaaatacaaaaatgagccaggtgtggtgatgcacgcctataatcccagctactccggaggctgaggcaggagaattgcttgaacccaggagctggaagttgcagtgatccgagatcacatgactgcactccagcctgggcaacagcaaggctccgtctcaaaaaaataaaaaaaataaaaaaattagtgattctaatccttgaactgtgtaaatgttaccttatttggataaaggatctttgcagatgtaattaagaggcagaggttggagtgatgtggcccaaagcaaagaacaccaggaggctcccagaaccagaaggggcaaggaatggattctgctctagagcctccagaggtagagtggctctgccaacaccttgatttcaaatgcctggcttcagaactgaaagagaatacacttctgttgttttaagcctctcagtgtgtggtacttttttacagtagtctttacaaacaaatatacctagcaaccaccatgccttgttttctatctgtataagttttgcctttgcaaggatgttacatagacagaatcctgcagtatgaagcttttgtgagtttggcttctttcactcagcataacacagttgagatgcatccatgctgttgcatgcatcagaagtctgttccttttggatgctgagtagtatttcactgctggatacaccacagcttatccattcaccagttgaaaggcatttgggtcactcctaattgggagcattataaataatgctgctatgaacatgtgtgtatagatctctgtgtggacatacactgtcatttctccagagtagataccctggagtagaattactgggtcatattgtaagtgtatttataattttatcagaaattattacccgggcatggtggcatgcacctatagtgccagctacttgggaggctgaggcaggagaatcccttgaacccagtaggtggaggttgtagtgagccgagatcatgccactgcactccagcctgggcaacagagtaagactctgtctaaaaaaacccaaaaaaccaaagaacaaaactacaaagaatctgatgtggctcatgcctgtaatcccagcactttgggaggccgaggttggaggattgctggagctcaggagtctgagaccagcctgggcaacatggcaaaacccgatctccactaaaagtacaaaaattagttgggcgtgatggtgagtgcctgtagtcccaggtacttgggaggctggggtaggaggatcacttgagggtgggaggcggaggttgcagtgaggtgagattgtgccaatgcactctagcctgggtgacaaagtgagaccctgcctaaaaaaaaccccaaaaaacagaaagaaactgacaaactgttttccagtgtagctataccattttgcattctctccagcacttagtattgtcaggtttttaaaaatttagatattttaggccaggcgctgtggcttatgcctgtaatcccagcactttgggaggcagaggtgggcggatcacttgaggtcaggagttcgagacgagcttgaccaacagggagaaccagatacttgggaggttgaggcaggagaattgcttgaacctgggaggcagaggttgcagtgagctgagatcacaccattgcactccagccctccagcctgggcatcaagagtgaaactctgtctcaaaaaaaaaaaaaaattagatattttaataggtatgtaacaatcatagggttattgtgagaatgaaatgaacatatctgagaatactgcctagcacatggctcctggcttggaagggtaagctcctcttattgcaatcactatggggttatgtcctgtccaggacaaaaccagaggtgaaaactcaaaaaaaaactcaggtgggccaggaggaggctgtggggaccagtgagctcatgtcccatcttgaaggtcaaggtcccgggaagcagctcctgagatggaaatctgcatgtgggtggttttccaggtagtgctcttaggatcttggaggagccagggaagcaggctcgggcagttgcaatagaggccttgaccagtcccatcaggagctgggccagcccttaggacatgtcacagcctgagacagggaggtcatgcctctgtactctgcaagatcagactttggagtggttgcccacaggagagatgttattaatatcttgggtgaagcagcccttttaagctggtgccttgatccgggtgatggctttgaggtggaaaacaagcctgagtggtttcagctttcaacttttcaagagaagctatgtatctagattttgatgttaactctccaaacttttttaaaatgctggaaattctagacttttcaaacctgctgtgaggggctcacatgccaggcacaagggctggagggggcctgaggctgcctgtcgatgccccttgatataaaaccaggctgggtgcagtgccttatgcctgtaatcccagcacttcgggaggccgaggtgggtggatcacttgaggtcaggagttcgagaccagcatggccaaagtggtaaaaccccgtctctactaaaaaatacaaaataataataataataataataataataataataattagctgggtgtggtggctcacccctgtaatcccagctactcgggaggctgaagcaggagaattgcttgaacccgggaggcggaggttgcagtgagccgagatcgcgccattgcactccagcctgggcaacaagagcaaaactctgtctcaaaaacaaaacaaaacaaaaacaaaaacaaaaaaggaaaaccaaacaaaaaaacccccaaaacctgctgtgtcatctgacatcacgctagtgtctggttgccgcactggagaggacaccccatggggcaggaatctttgggttttgatctccaccacatccccagcatgtagggcagggtccaggcctggatgcagcacgagagaaggaacgcagggcccgaatgagtaatttgcctcagtgtgcaggtcatttaattgcaaagagaggaaaaacgacaaccaaaaacaaccaaatgaaaaaatgagcaaaggatttgaatagacatttctccaaagatgtacaagtggccaataaacagaggaaaagatgctcagcgtcagtaatcattagggagatgcaaatcagaattgcaagcacgagataccgcttcacacctattaggatgcctattaaaaaacaaaaacaaaaaacaaaacaaaacaaaaaaatcaggcagagtgctgtgactcacacctgtaatcccagcactttgagaggctgaggtgggcggatcacctgaggcagggagttcgagactagcctgaccaacatggagaaatcccgtctctactaaaagtacaaaattagccgggcgtggtggcgcctgcctgtaatcccagctactcgggaggctgaggcaggagaatcgcttgaacccaggaggtggaggttgcagtgagccgagaccacgccattgcactccagcctgagcaacaagagcgaaactccgtctcaaaaaaaaaaaaaaaaaaaaaaaaatcgcagatctgactgtgtgaccttgggcaagttgcttgacctctcagtgcctccatttcctcctctgtaacgtgagagtaaaaatactactcatacctacctcgtagggctgtcatgaggactgaataagtgcataggtacagacatgcttaggacagtatcagcacatgcaggaattacatgggagttggctgttaatattattacaggagtggatcaaatccatctctgccatggacttgctgtgtgacctagtgcaggtcactttgcctctcttggtccagttttctcacttgtaaaatgggaccatactgccactctccatagggcaagtgtgcggattcgaggagctcatatgtgaaaggcctccttcaggcgcaaggttggtccttggttatgcacgtatgtgagcctcttggcgtgccttcatatgtggggcataggcaagcactcaagtggcctggactcctatctcggctctcaatgtccccgcttcctggcctgggatcagcaggacctcagtggatccaccatccaggcacatccctttctttccctgcttttttcctgcttcttgggcggcaccaccacctactggcctaaagctacattgcagccaatgtgcacagcggggcggagggaagggaatatggccttgggcagctgctgtgcgcagaatatttacctctgtacacgcttagggtgctgaggcttagggagctcacacggagagagccagctgtgaagctggggttagaatccctgtctccctttcacctcactccaaacaccctcttagaatgggaactcagttcaggttctgccttgggccctagacgatccacccctcccttctgagcagggagccaggagctgaagtccagggtccttggaagtatgtcagggttgtccccccagggtcctgattacagaagaaagaacactggactcagagtccagaggttgggggtctagctttgccttccctatccccaactatcagcaaaacagcctttggaaaatcctcacccatttattctagcacttgtcatttcgaaatatatttactgtgggagagcatttaatgtgagtgttaggttctaacgcaaggagaaaattataaaaataaacaaaaacttttaaagaactcctaaaaatcctttaagtcactcataaagtataatatgggcagttttctaaatatagtcctttgcagcaataaatgcacggaccataaagaacagcagtatatggtggtgattgcatgcatttgcgaactgtaattttaggttctgttctctctcaggggtgtgtgggattccgagctgtggatccacacccccacatctctctcacagctgggatcatgtccaggcagaatcgcccacattgtgtacatcattctcccttctctctctctttctgagcgcacatagctgcatttccgaagttacataataaaaacagctaacatttattgagctttcattatgtattaggcctgctcgcagccctttgctcacgcattaattcattaattcagataatcctcctaagaatgttatgaggtaggtatattattatctcttctctttacagatgaggaaactgaggcactgaatggttaagtaactagcccaaggtcaaatagtgtaccacccagcccgaaggcgttcaccttgttcccgggtaggatcgcagaactggttaagctaggttaccgatccgggtggtgtcagctgatccctcagctgctgtagtgcaagatctgcaaaatatctcaagcactgatcttaggttttgcaatagtgacactgtccccaggaacaacttggggaggttcagacccttgctgtcagaggctgcacagcccctaaaccttgatttctaatcttgtagctaatttgttagtcttacaaaggcagactggtccccgggcaagaagtggatcttttcaggaaagggctattgtcataatttcctcagttacaatttttgcaaaggtggtttcaatagccagtgagtggtacagcctgaatttgaaggcaggaagtccgggacgagaacccacactcttgactggcatacttgccacctgaatggaggctccatagagccacgcgtgcatgcttgtgtacctgttgtcagcccgcaagctccgttaggcaggctagaacctgatccaggttaactttgcatccttagtgctggttctttccatccagggccccactcagggtatatgctcagtgactgttgtacaaatgcataaagctcagtttgcataaagctcacttcagcttctgtatctgtaagacaagaatcagagccaggcacagtggttcatgcctataatcacagaactttgggaggctgaggcgggcggatcacgaggtcaggagttccaggccagcctgtccaatatggtgaaaccccgtctgtagtaaaaatacaaaaattagccaggtgtggtggcacgcatctgtaatcccagatactcgggaggctgaggcagaagaatcacttgaacctgggaggcagagtttgcagtgagccgagatcatgccactgcactccagcctgggcgacagagcgagactccatctcaaaaaaaaaaaaaaaaaaagaatcgaaatcagctcttcagattgctggaggctccgacaagcccattggtgggaaaattctctttaaagacactgatgtgggctgggcacaatgactcatcctgtaatcccaacactttgggaggccaaggtggatggatcactagaggtcaggagtttgagaccagcctagccaacatggtgcaaccttgtctctactaaaaatacaaaaaattagccaggtgtggtgacatgaacccataatcccagctactcgggaggctgagatgggagaatcgcttgaacccaggaggcggaggttgcagtgagccaagattgcacatctgcactccagcctgggcgacagagcaagactccatctgaaaacaaacaaacaaacaaaacactgatatagtttggatttgtttcccctcccaaatctcaggtggggttgtaatccccagtgttggaaaaggggcctggtgggaggtgattggatcttgggggcaaacatcccccttgctgttcttgtgatagtgaatggattcttacgagatctgcttgtttaaaagtgtgtggcacctcctcctaccccgctccagccatgtagaacgtgcctgcctccccttcgccttctgccatgattgtaagtttcctgaggcctccccagtcatgcttcctgtacagcctgcagaaccgtgagccaattaaacttctttttttaaatgaattacccagtctcagttcattataccaatgtgagaacaaacgaatacagacactaaattctcctttgcccacctcctgcttggtcccttcttgaattttcaagctgctcaaccaagtggcctgcaccagcttgggagagctaatcgtgtgtatctgtacccaactctacattcagtaacatcatgtttgtagctcgaaatcagcaatggtgagtatttacactatggcaattggcaaatgcttcaaacaggagttttcccctctagagatgttaaacgtttgccaggaggaaatcaatcctctaatggccaccttcaaggaggcaacacagtggagtgatcatgcttgttggctctggagccagaacacctgggttcaaagtccagctctatcacttaccagctgtgtgaccttgttcagttacttaacctctctgagcctcattagtctcattcatgattacgtatttcattggggactcaatgccatcttccatataagtgctctctcaattaatgttatatattaatattatcaatcagcttaagaggtggggaaactttcttgttttccatcctaggaaagggagtgctgaggacaggacttgcagtgtcaaaaaggaacctcaaaaacggcaatgtgtaactgcaggtctgggccatttttgagggtctcttgagcattggcagaccagatctttatgccaacacaggttgtgcgtgtgggggttagaggaggagaggccttctcagttctttgcaggaaaggctactgttagctctagagcccagaacagatttagggggagagatgatctaaccaaactttccctctgccctcggcttgccagtcttctcgctagtgaacactcccagtgtgaggtagagggttccctgttccacctccttcctccctctgtagaggaggtatgcattggggcaggtgtgtgtaaggccctcctggggtacccctccagggaatcttcccatcttctccagtactgccccatctgacatcctgcctgaagccacaggtttcccttgcaatcactaaagaagcaggagggaaccagcagaactccctgcccatgtgcacaggaggtgatccagaaacttcaaggggaaaaatcctgctctccaccccagcaggcattgatttttggctgcgaagattacagtctctctctctctctctctctctctctctctctctctctctctcacacacacacacacacacacacacacacactcctgtgtgccaggaggttcctagaaggtcctcactcctcgcactcaggtgctccagggctagcccactcctgggaggtgcccacaactgaccacgatgcccacaagactgtgggaagggttgccccatgtgccttcgtgcccctcccactggatcccaacgaaggctcttttcacaacaggaatcagagcatgtcactcccaacctgcctaaaccctccaatggctcccaccacttttgatcaagacctaaatcctttctgagtccaccccatccttacagggtctaaccttgcttccatccctgtcttcaccccttattcctccctctgggctcctcttcaggcccttgaggtgccaagctcactcctgccctgggcctttgctgctgctgtccccttggcctggagcactcttccctgtcctttttgcccatgtgaggctgagaggcagacggaatcatggttgctagtgtagagaggccacactactggagtttgtatttcagttctgtcaccttgaactgggtgacctcacccatctctgcctccctttcctccctctatacagtgggaaagataatagcacctacatcttagggtgttgtgagactgattgagataatctgtatggtttttggcagtttctgaaatgcactgtaaactgtctggttctcctcccatcggaaggtgagaatctgactgctccccttgactctgggtgagagggtagggcaacagcaatgctccatgatttcagaggctgggtcataaaaacggtctgcaggggattcacttccagaacagtggagtgaggaacactgcagactgctttctggtgaaaacaactgatgatgatttctaaaaaacaatcatttgaagtctctggaaattgtcctaagagcatacagcaagtgaagaaacacttattcaagaaaatctactaaatctaggtaagaacagtgagtttgtagaacttgagacacaatccactctctttctcccctccattccattttactgttatggaaactcaactgtgagcagccagggccaagaagatgggagtcatttccccccaagctcctagtcgatggggtacagcatctccccaggaagggaaggctgccagcatttgtcatcctcccaacagctatatcttacagaggctaaactccaggtaggtgtggctgggagactgggatcttccttcctctacccagtccccactcatagggtggtggccacgccaagtgcagcaggctaaaaatattgaagccccagttgcttttgtcttagcttacttgttaaagcagaggttccatgcctggagatgcaagctgagaagaccagagactaagaatactgccccaactcagccctgctcataaagcaagaaggttactctgggagaagtgaactgttgtccctgcctccagctccagagcagtgtcacagatgctttgcccaagagagaggcaggtcataacaacacagatctttaaagttgtccataaaggaactgactttctttagaacagagtatgcagaaatttaagcctaagagtgccctcagaagcagtggcgattttggtagtgatcagggacccaaagttgctatactatatcatcttaaatgttcattttccagcaaagaatttcaagacttgcaaagaaataaacacatgtgacccatacacagggaaagaccagtcaacagaaactacctgtgagagtgctcagaggtcagacttgcacggacttcaaagcaaccactgtaaatatgttcaaagaaataatggaagccatgcttaaagaataagggaaggtaggctgggtgcagtggctcatgcctgtaatccccgcactttgggaggccaagaggggtggatcacctgaggtcaggaatttgagaccagcctggccaacatggtgaaaccccatctctactaaaaatacaaaaattagctgggcatggtggcaggtgcctgtagtcccagctactcgggaggctgaggcatgagaatcacttgaacccaggaggcggaggttgcagtgagctgagattgtgccactgcccttcagcctgggtgacagagagagactccatctcaaaaagaaaaacaaaaacgaaaatcaagaataagggaagcggtgatgactgtgtctcatgaacagagaatgtaaacaagaagatactattttaaaaaacttaatggaaattctggagttgaaaagtgcaaaagaaaaattcactagaggggctcaacagtagacttgagccagcagaaggaagattcagtgaatctgaagacagatcaatagagatttcgcagtctgaagaacagagagaaaaatatgaagaaaaatgaacaaagccttggagaaatgtgggacacagctaggtgcaccaacatatgcacaataacatatataacagaaggagagcaaagagagaaaggaacagaaaaaaatgtgcaaaaataatcactgaagcctttgcaaatttgatgagaaacatgaattatgcattgaagaagcttaatgaactccgagtagaacaaatgcaaagtggtcaacaaccagatacataaaaggaaaatgttgaaacccaaagataaaaagaaaatcttgaaagcaacaagagaaacacagctcatcacatataagggaacaccaaataagaccgacagcagatttctcatgtgaaacgatggaggccctaaggcagtgggacaacatattcaaaatgcataaacaaaaactaccaagcaagaatcttacatccagcaaaattatctttcaaaagtgatgatgaaagagatatttccagataaacataaactgagaatttgttgccaggaaacttaccttacaataaatactaaaggaagttcttcagacagtaatttgaatccacacacacaaaagccaaagtgctctgggaaaggcaagtagatcgttatgaaaggcagtaagaatgcatatttattcaccttctcttaacagatttttaaaaataatttgtatataattgtattgtggggccaagacatatagaaatgtaatatattttgataataatagcacacaggaggtgagtgggagcagagctgtattggattaagaaagtgagaccagatgggaactggaatccacaggaacaaatgaagagaaccagaaattataagtaagaaagttaataaaacaaagtcttttaatatatacttgctctcctttcttctctcagcttcttcaaaagacataaaactatataaagtaataattataacaaagtactgttggttttgtaacatatgtagatgtaatacatataaaaagaatagtgcaaagaggaagaagagagaatagtgctatataggagtcaccgggcacggtggctcacaactttaatcccagcactttgggaggccgaggcaggccagtcacttggggccaggagttcaagaccagcctggccatgtatctctacatataatagattgaaaccatgtatctctacgtataatacaaaaattagccaggtgtggtgtcatgtgctggtaatcctagctactggggaggctgaggagaattgcttaaacccaggaggtggaggttgcagtgaaccaagatcacgccaccacactccagcctgggcaatagcacaaaaatctgccaaaaaaaaaaagatagaaatatataggagtaatatttctatatatcactggaattaagttactgtaaatctgaagtcaattctgataagttaaaacctatatagtaagcctaaactggtcattaagacaaacaaacagaacagtgaaaaagctattaaagaaatttaaggctgggcacggtggctcacacctgtaatctcaacactttgggaggctgaggtaggtggatcacctgaggtcaggagttcgagaccagcctggccaacatggtgaaaccccctccctactgaaaatacaaaaaattaggtgggtgtggtggcaggcacctataatcccagctacttgggaggctgaggcaggagaattgtttgaacctgggaggtggaggttgtagtgagccgagatcatgccattgcactccagcctgggtgacagaatgagattctgtctcaaaaacaaaaacaaaaacaaaacaaacaaaaaatccaaaaaacagaaatttaaataatacactagaaaatattcgtttagtgtaaaagatgtcaaggaagaaaagaggaacaaaaaagacatgagacatatagaaaataaaaagtcaaatgacagacataaatccaacttctctcaatgatagcattaaatgtgattggatcaagtcaaaagggagagatttcctgactaaataaaaagccaagatcaactatatactgtgtgcagaagatacactcaagattcaaaggttaaaagtaggttgggcgttaaaggctgaacaaaatatatcacgcaaacagcaaccataagaaaacttgatttgctatattaatatcaggaaaaagactttaaaatgaaatatgttacaaaagataaagaggaacattttataatggtaaaaggatcaatcgatccattgggaagacataaaaattatagacagatatgcccctaacaacaaagccccaacatgtgtgaagcaaaaacagaaagaattgaaggggcaaatagacaattcaaaaataatatttggagacttcaaaaccccacttttaataatgaatagaacaactaaacagaagactaaagaaggcaatagaggctgggcgtggtggctcatgcctgtaatcccagcactttgggaggcccaggcgggcagatcacctgaggtcaggagttcgagaccagcctgaccaacatggagaaaccccgtctctactgaaaatacaaaattagccaggtgtggtggcgcatgcctgtaatcccagctactcaggaggctgaggcaggagaatcacttgaacctgggaggcagaggtttccgtgagcccagatcacaccactgcagtccagcctgggcaacaagtgcaaaactccgtctcaaaaaaaaaaaaaaaaaaaagaaaaaaaaaagaaggcaatagaagacttgaacaacactaaaccaacaagacctaaaagacatctatagaacatttcacacaacaacaagataatacacattcttctcaagagtacgtgaaaaattatttaggacagactatatgttagaccacaaaacaaacatcaatgatttttttatcttttatttttttttttaatatggagtcttgctctgttgcccaggctgaagtgcagtggcatgatctcagctcactgcaacttcagcctcccgggttcaagcaattctcgtgcctcagcttccagagtagctgggattacaggcacccaccactatacccagctaatttttatatttttgtagagacagggtttcaccatgttcgctaggctggtcttgaactcctgacctcaagttatctgcctaagtcggcctcccagagtgctgggattacaggtgtgagcaaccgtacctggacaataaattttaaaagattgaaatcatacaaagtaccttctctgactaaaatggaatgaagctagaaatcaatagaagaaaaccaagataattcacgaatatgtgaaaattaaaaacacactcaaacaactaatgtgtcaaaatagaaatcacaagggaaattggaaaacaccatgagggaatgagaataaaaatataacataccaaaacttacgtgattcagtgaaagcagaaaaatttatagctgtaaagacctgcactaaaaagggagaaaggggccaggcgtggtagctcactcctgtaatcccagcattttgcgaggctgaggcaggcggatcacttgaggtcaggagtttgagaccagcctggccaacatggtgaaaccccatctctactaaaatataaaaattagctgggtatggtggcacatgcctgtaatcccagctacttaggaggctgaggcgggagaatcgcttgaacgcaggaggcagaggttgcagtgagccgagagcgtgccactgcactctaacctgggtgacagagtaacactccgtctcaaaaaaataaaaaataaataaaaaaatttttttaaaaaggagaaaagtctcaaaacaaccacctaactctacaccttaaagaactacagaaagaatacaaaaattagccgggcatggtgatgggcacctgtaatcccagctactctggaggctgaggcagagaatggcatgaacctgggaggcagagcttgcagtgagctgagatcgtgccactgcattccagcctgggcaacagagcgagactccgtctcaaaaaaataaataaataaataaaaaataaaaagaactagagaaagaagcacagactaaacccaaagctagcagaagaaagaaaataattaagattggagtggaagtaaacaaaatagagtatagaaaaacagtggtaaaaaaatcactgaagctgggcatggtgccacatgcctataatcccagcactttggaaggcagaggcaggtggatcacttgaggccagcagttcaagaccagcttggctaacatggtgaaaccccatctctactaaaaacacaaaaattagctgagcctggtggtggacacctgtaatcccagctatgcgggaggctgaggcaggagaatcacttgaacctgggaggcagaagttgcagtgaactgagatcatgccactgcactgcagcctgggcaacagagcaagaccctgtctcaaaaaaataaaaaataaaaaaataataaatcaaagaaacaaaaaattgatcaatcaaattgacaaacctttagctaaactggctaagaaaagaagattcaaattactaaaatcagaaatggaagttcggacagtactactgaacttacagaaataaaaataattataagaaaatactatgaacaattgtgtaccagcaaattggagaacctagatgaaacggacaaattctggccaggcgtggtggctcacgcctgtattcccagcactttgggaggcaaaggcaggcagatcacaaggtcaggagattgagaccatcctggctaacatggtgaaaccccgtctgtactaaaaatacaaaaaattagcctggcatggatggcacgtgcctgtagtcccagctactcaggaggctgagacaggagaattgcttgaacctgagagatggaggttgcagtgagccgagattgtgccactggactccagcctgggtgacagagcaagattctgtcaaaaaaaaaaaaaaagaaagaaaggaaagaaagaaagggacaagggacagattcctagatacacatgatataccaaaactgagtcatgaagaatggaaatctttatagacctgtaatgaagcagtgatcaaaagccatccaaaaaagaaaaacctttgacaagtccctggtgaattctaccagacatttaaagaagaactaacatcaatctttctcaaactcttccaaaaaatttaagaggagggtcggggggctgggagatccaacatgacctcatccacatgactggcaattggtgctgattgtcagcaggaatgtctgtgttctcctccttgcggtcactcttgctctgttaggtcagacatcatcccttacatagaggcccaagggtccaacggtccaagtccaagactgaagctgcaaggtctcttgaggcagaggctctgaaaaccacatgatgtcacttctgtcacacgctattggtcaaagcaagtcacatgcctcactcagcttcaagtcagtggagaaacagactccaccttggatgggaagaatagcagagtcacattgcaaaggggtgtggataagggttgggaggaatgtgtagccattaatttacaccagataatgtgagtgtttgcactttacaaggtccacaggtccactgatacagtttggctctgtgtccctacccacatctcaccttgaattgtaataatacccacgtgtcatgggagggaccccatgggaggtaattgaattatggggcgggtttttcttgtgctgttctcgtgataatgaagacatctcaagagatctgatgtttttatcggggggagttcccttgcctgccaccatggaagatgtcccttgactcttccttcatcttcagccatgattgtgaggcctctccagccatgtggaacagtgagtccactaaacttgtttcctttataaattacccagtctcaggtatgtctttattttattttattttattttattttattttattttattttattttatttttgagacagagtcttgctctgtcacccaggctgaagtgcaagggcaccatctcggctcactgcaacctccgcctcccacgttcaagagattcccctgcctcagcctcctgagtagctgggactacagtgcacgcctccacacccggctaatttttgtattttagtagagacagggtttcactatgttggccaggctagtgtcgaacttctgatctcatgatccacctgcctcggcctcccaaagtgctgggattacaggcatgagccaccatgcccggcctcaggtatgtctttattagagcgagagaatagactaatacatccaccaaccctaggaagtcagtggaagggtatttccgtatttcatatggaagtcatttccatatgaaaatttagccagaggatttcatgctggttgtctgaaagccaggagcttctaaaaaactttcagggtagctgtctaagcatgacctcatgtcatcctgttgtgagtactaaattagttaattcaggggaggcactcagaaaagtgaagaaagggaaatctttcttatataaatcttagaaatctcatagaaatcttaggaaagtgcctggcgtgcagtaaacacgtgatacatttcagttgttattatcttcacaataatttttttgggtcaggcttgttattttccctgttttacagattaaggggcagagactcagagatgcgcagtaagtcgcctgagggttacgcagcaaataagcagggaagccagatgagaacctacatgacagagtcacccatgtgtgagactccaaagcctcattcaggtgcacagagaggcggttgtgaggacgttcactgctgcgttgccttcagtagcttaacatcagaaacagcgcagatgtccaccaacaggggccacccagtaaaccccagcatgcccagccaaggagtgctttgtgctggttacaagaaatgaggtcacgctatacataggacatgggatcatctccaagacattctgttcagtaaaaagaacatctgaaaaaaaagttccataacccacagaaaatactgccaaatattccaaaaaatctaagtccaagtgtgtgtgtatgtgacctctggaggctgatctgaagcaaatgtaggtgaattaaacaataggatctatttataggactcttcttttcctacttttctttatttttgttggattttgaaacatgttcaaagaaaaattcagagtacaataaagtaccagtcgggcatggtggctcacgcctgtaatcccagcactttgggaggctgaggtgggtggaccacctgaggtcaggagttcgagatcagcctggccaatatggtgaaaccctgtctctgctaaaaatacaaaaattaggtgggtgtggtggcaggcacctgtaatcccagctactcgggaggctgaggcaggagaattgcttgaacccaggaggcaaaggttgcagtgagctgattgtgccactgcactccagcctgggcgacaagagtgagactgtgtctcaataaataaatgaaagaaagaaagaagaaagaaagaaagaaagaagaaagaaagaaaagaaagaaagaaagaaagaaagaaagaaagaaagaaagaaagaaagaaaaagaaaaagaaccaagaagaaaaaataatcaccggagattcctcccctcccctagagctaactaggctaacattttggtatatatctttccagtccggatcctgtgtgactgagtgtgtatatgcatatgtattattttcaactgttggctttctccttgtggtccaagacagctgctccagatttagccattacatctgtttcctgccagcaagaaagggaaaatgggaagtagagggccttttaagtatacaacctagaatttacacacattattctttatcacatctcatttctctaaatgtagtcgcatggccatcctggccagaaggaagcctgggaaatgtggtctttcctctgggctgccttgtgcccagtgaaaagtcaggggttctatgactatgaaagaaacaggagaatggatattgtggcaactagcagtgctattcacctttattctctcaatggtaatatttttccccatcaagaggggaaaatttgtgtcttacattctaaccactgaactccgagagaagacactggcctgtgccattctcttgcgatggagtttcgctctgtcgcccaggctggagtgcagtggggtgatctcagctcactgcaacctccacctcctggattcaagcaattctcaggcctcagcctcccgagtagctggaattacaggcacctgccagcacacccctttttagaccacatagggtagcttccgactgttgccatggcatttgtgaattgtcatgtgctggtgggagtgtctcttagcatgctaatatattataattagcatatatattataatgagcagtgaggaggaccagaggttgctttcatcaccatcttggttttggcgggatctggccagcttctttactgcatcctgtttgttttatcaataaggtctttgtgacatgtaccttgtgaaaccagtcctgcctaagggagcggggctggcggttgttcagagtgaacaattcaaagtcaggtcctccctcttggagctcagagacttgaagagcaaggaccactgtcaggacacaaccccatttgcaaggccggggacacacatacagacccacaggccattgtagagaaagtgttaaaagatggaagtcaagccacggccactggaagtggtgtgccctgagaggcagagggttctccctaagccagggaaggacaaggcagggcaagacagaaactgggcctggggccaggattcctgagctggggctagatttgcccaaatctagggcagggctgactgggtcaagcacagcagggagccagggtgggtcgatccccctgccacaggcttcactcttctggctctggtttccaggcagttctaaaagcctcccagtggcccagtgcagtggctaacgcctgtattcccaacgctttgagaggccttaggcgagcagatcacttaaggccaggagttcgagaccagcctgaccaacatgtcaaaaccccgtctctactaaaaatacaaaaattagccaagcgtggtggcagtgcctgtaatcccagctacttgggaggctgaggcaggagaacccaggaggtggaggttgcagtgagctgagattgtgccactgcactccagcctgggtgatagagcaagactgcatctcaaataaaataaaataaaaaaatcaaatcaaataaaatgtctcccagaatacaccaccccagcaaaatggcaggagggagtgtcacctggggacctccactttggaggtttgagtgggcagctttaagctggaacagtcactcttgctgtgggttctcagggcggagactgagcccccaccctgcctcctcaaatgcatttcctctcagctcccacctgccagcccaggagagagggagggccattctgtccttttcctgcagagtccctttgttcagttggtgaccaacatcctgaaaaacattctcaggagatcaaaaagaagaacattttggtctatgtggtaggttggcccagtgcaccacgcccagtgcaggtccctcttgaaaccacctttgggaaattatgactgagacaccacctttgcaaaattatgactgagacaatgagagatctttttttttttcctttgagacagagtttcgctcttgttgcccaggctggagtgcaatggtgtgttctcggctcactgcaacctccacctcctgggtttaagcgattctcctgcctcagcctcccgagtagctgggattacaggcacgcgccaccatgcctggctaatttttgtatttttagtagagacaggtttctccgtgttggtcaggctggcctcgaactcccaacctcacacctgaggttgcctcagcctcccaaagtgctgggattacaggcgtgagccaccacgcctggcccacagtaagaggtcgaacttaacctactctatcttgcttctaacctccaagctgtccttgttcattcctgggcataagctgaactaaccttgggagaaacttagtttatactttaaacagccctttcccaaagcagacctccttcttgcctggggactaagctgcctttgtaggactaacattagccacaaaattagaaattttggtttaggagtcatgcagctggaggctacaagatcctgaccctccctaaactactcctgacatcagggcttgagatatttttcagaccctgcacttgatggatcagctggcatcacccacgtcaataaactggctcatctgatcttgtggcccccacccaggaattgattcagctcaggaagacagcttggactccctgtgatttcaaccctgaccaatcagcactcctggtgcactggcttctccccacccaccaagttatccttaaaaactcttctccccaaatgctcggagagacagatttgagtcataaaactccagtctcccacgcagctggctctgtgtgaattactctttctctattgcatttctcctgtcttgatgaatcggctcttgatgaataggcagcctgcaaggtgaaccccttgggcggttccactctttgcccagggtgatgttatttctctccaggatggctgcagcggcttctgagcctgcttgcatctggtgtggtccctttcaatgtcacgcaggccaaagcagccctccatctctccatgatcttggcttccaaggtactctgtctctctctctgggtcgccatactggcttccatcaggccctggaatgcatcctgctggttctatcccttggccttcaaaagtgcggtttcctcctggaaggcaccttctgccttacctcacacttccttccctcctacctgccttgagataccagcttgcaggggcattcttgggaaagccgaccccttggactgagtctggagttttgatctctctctctcttttttttttttttggagatggagtttcactcttgatacccaagctggaattcaatggcgtggtctcggcttaccacaacctctgcctcccaggttcaagtgattctcctgcctcagcctcccaagtagctgggattacaggcatgtaccaccatgcctggctaattttgtatttttagtaaagatggagtttctccatgttgatcaggctggtctcgaactcccaacctcaggtgatctacctgccttggcctcccaaagtgctgggattacaggcatgagccaccgtgcctggccttttttttttttttttttttgagatggcatctcactttgtcacccaggctggagtgcagtggcaccatcatggctcactgcagcattgaactcctgggctccagcaatcctcccacctcagcctcttgagtagctgggatcacaggcatgtgccaccatgcctagctaatttttgtatttttttttgtagagacagggtctcattatgttgcccaggctggtctcaaactcctgggctcaagcaatcctcctgcctcaacctcccaaaatactgggattacacgtgtaaaccaccacatccagccctgatctcattcttcagagaatttacctagctggtcacttggtgtctgtaggagcatcgcctctcaggcctgcctcaaaactgcatttcagttgggagtggggcggggggagggagagtgtagtttggggacatcaagcgtctgtggtggatctcctcccaaagtgagactgctttttaatgatatttattgagcacttactgtttgccactgcggtgctaagcactttgcacatactagctcagtgcatccttacagcaatcctgggagggaggtgcttttctcatccgcatgtgctgacaaggctgagaagagctgggtcttgcacggtaccttaagggctaaagacctgcaaggatggtgcatgaaagcaaaaccagagaggcgccttttccaaatgccaatgcgccctccacccagtccttcacaaaccacatcagcatggatagcaccacactccacaggcttttctgcatctcctttgtgtgtgtgcacatgtgtaattaattctggggcaacttcctacatcagtacagagaaactccttgatcattatccactccaacatccttcctgggagggactgactggaaacccaaatgcccttgtaagggcaaatacaaaaactaaaataattctccctggtgcagaaaaaggaaagaaacctcccgtttcctgttcttaaacactctagagcaaacactttagaaaacttctcaattatttctctgttcctttaagatgtgtctttttaaaagccaggtgagcctcctgccagttttacaagccagggatgttttcccaaggacctaggagccatctctttggaaggtaaacatcaagattgcacccttctcatccagtctccatgggcagataggagcctaacttcagtgcttggctccaagttgcaaaacaatccatcgtctatcataaagatgtgagtttatattttctctggataaagacaattagctaacacagatggccactccaattaccaggtgaattcgggatgaaataagttgcaaattgtgttgtgcagtcatctgactcgagaactatttttttttttttgagacagagtctcgctctgttgtccagtctggagtacagtggtacgatctcagctcgctgcaacctctgcctctcaggttcaaacaattctcctgcctcagcttcccgagctgggattacaggcgtgcactaccacacctggctaatttttgtatttttagtagagatggggttttgccatgttggccaagctggtctcgaacttctgactttaagtgatctgcccaccttggcctcccaaagagttgggattacaagcatgagccaccaccccggccctagttattatttgaggacatgtatgcaataggttatacctgcttggttatataggaggacgaaatgtatttctctttgtaatctcttttgtggattgcctgtgatgcccactgcagtctggtttaacgcttatttaataataaaactgttttctcttctacttttgtggaaaggttttctggattagatctttaattttgtctccagcatcttcaaatgtctttctacagagggttggttaaataaatgtggcatctccacaaaagagaatactgcacagtcatggcaaaaaaacaaggagcctgttttcgttgttgaatgaaaagtgcaaggtgcacaacagtttactactttttctgtaaaaaaagaggtctgagaaggctgtatttgccatttgtataatctctggaagggtaaacagcgactgataaaagtgctcgtgtgtgtgtgtgtgtgtgtgtgtgtgtgtgtgttaagagaaactgggcagatgagggagaggaaagggatgaaaacctttctctgtacaccttatattttctgattttttgaaacacgtgactgtattacctattcacagtaagttaacagggatgggaagcatggtggtggcaagcaaacgaaacctctaaaaagaagtcccaggggccgggcgcagtggctaactcttatgatcttagcgctttgagaggccaaggtgggcagattgcctgaactcaggagttcgagaccagcctgggcaacatggtgagacctcgtctctactgaaaatacaaaaaatatgccaggtgtggtagtgcgcacctgtagtcccagctactccggagactgagaggcaggagagtcacttaaacctgggaggcagaggttgcagtgagccgggatcacaccactgcactccagcctgagcaacaggcaggactctgcttccaaaaaaaaaaaattagccaggtgtggtggtgggcacctgtaatcctagctactcaggaggctgaggcaggagaatcacttgaacctgggaggcagaggttgcagtgacctgagattgcgccacggcactccagcctgggtgacagagcaagactccatctcaaaacaaaaaaagccccagaaccagacatccttaagcacttgattctgttcatttctgagctcagccttgagcttagaaccaagtgaaaactaattacacattttcggagttcacattaaacttcttctttttaaaattattatttttgagacagaatcttgctctgtcacccaggctggagggcagtggcacgatctcagctcactgcagcctccacctctggggttcaagcaattctcagtctcctgagtagctgggactacaagcatgtgccaccatgaccagcaattttttgtatttttagtagagatgggtttttgccatgttggccaggctgatctcaaactcctggcctcaagtgatctgcccgccttggcctcccaaagtgctgggattacaggtgtgagccactgtgccatgcctgaacttctcctttgaaggaagatctgagtgtaaaagcagggaatgcctttatttaaaaaaatgaaaaacagaaactaaaacaaaataacaatcacctctgttgcctccatttgagagaatacttccaggggctctgcatgtctggtccccaacctggtcggggagttcactttcagaggctcagggatgggccttccccagccccaccagcaaatcatctctcccggcttccaggagggtacttactctccaactagtgggctttatgggccaggaaggatgacaggaaggggtgtgtggggtactacgtccctccacactgagaatccgaaagccaagatgcccaagattctatcgttatctgcttgtcttgtagaagcccctctgtgagactgaggggcaaaggagagagggcaggggcgtgtctcaacccttctggccacttctaggttgtgcagactgccactcttgttactacgatggactgtcagatcagcaggtggcccaggagggcttgcttgatgcgggctgctttttccttttgcctccgtgccatgcctgtgaggtagttggtacttactggaatccccactgcatgcatgaagaaacaggcacagagaagccaaatgactttcccaaggtcacacagcctgaagggacagccggctgtcccagctgtttcccttctaacacccttgggcctgcctccagctagatgctgcaaatcagtcctctcttgagagtcaaagcaaaggagatctgagctggtcgtcacaggtagtgtgacacagagttggggatagagccgcaccttgcatttccaggtgccatcttccccacagtccccagtgggcacttgcgttcatgattcaattactcaggctctgtctctctgttcctgccccttgctctgtgacctggcctctctggaccccagttccgtccgtgagcgatgggggcggggtcggcggcctgcctaggctggacagtgcagattgcagaagtccgcggacgagaagagccgcagcacgttgaccagagggaacatgagcagcgctccgagcagcgagcccagctgcaccgccgccccgcaccacaagagggcgctgcggctgaggtcgcgcaggaccacgcccagcatcaccttgacgtaactgaggcagccgctgaaaagcacccacgaggccacctgcggggccgggagggaagaggtgcagagtcacggggcttgcggggcgagcgccggagcaaagaactctcacagggctcaggggaacccacggaatactctctaggtgcgaggagcgccttctgggagtgagcctgcggggccgacgggtcccatgagttggccgcccgggggcgaaggagaatccagtggcttttctgggttcacgtgcccatgatcagggcaagggcccttgagagaaggcccctgctgaggtacacatggtgggaagaggcctaccagtcacctcgattccctaagcctccactcccaaatgaggaaggggcgcttcccccacctggggcttcccgggagggtcccacagaccccgctcgctggaaagggccgcgcccaagctctcccaggccttggctaggggtgaggggtacgcagcgggagcagccccaccggccggatactcacaatgaggacttccccaccccagtggccctgcaagagggggcaggggctcatcaccgccatggccatgttgtagcccccaaagcaggtcccaagcacggagaggacccccaggaacagcagagacctagaggaaagtaggggaggtgagtggaggtgagaagcctgacctctgacccccccgccccactgggcggcatgtggatggccagtgtctccatagttagtttagacccatgtggaaaattccaggttgcctggctcaagtgggtcagggaggctcctgagcaggcagggctggcctgagtcatccccagcattaacggcagggcctggcaccccggcaagaaaaacataatggactctggcaccggatggtcctggttcaaatcccagttctactgtttaagctgagactcgcctctgagcctccaaatcggagttttgcaaggctgcatgacctccaggagcagagcatgcaggcctggcgccgctgtgggcccacctggtgtttacctgctggcatttcctcctgcaacacaccctcagcctcagccaggaagctgagttgaagtgaagatggctggatcgggcattggcacagtagggtttgctgtgcctcctcaggagacccctccccttctggcctcagctacctgcctctgcaatgtggagtgtgctgatctccaggggtcctggcagctggcttgttgctgctaggagcatctctctacaggtggccttccatgcaaacctacatctgggaccactgtccttcctcacaggtccttgtccctggggtcccaatctctagaaccccaagactggtccacgccctgggtaagaacagacagaggtctgcctatacccttaaagactctttctgctccaagattcttggattccatgactcagattctgtaattctaacatttggggtttcttggatttgcaggtctgagcctttggtcctgcttccctcaaatcctccatcctctttccagtttctaggtcccaaggtagaaaatccagcttcctggcaagctttctgtcaagctcttctgtcctcactgtccttcttctgggctgggagagtgggtgtaagcaggccagtgaggacaggcaggccagcgtggatacgaggctgtaggacccacctcaaatgtcaagatcccaaggtggtagttctcctacaggggtctgaagcccctgcctcagaaccgtctggtttccttactaaaaattgaaatcccaggtcccagtctaggctggttcaatctgcattttatcaacttgcccagccattcttctagaactgtggctctaagggaaccagcaggaggttagaggcaggaaggcagggccgaaatcctgggaattagaccaggtcaagctctttctccaagcctcagggtttccccttataaacgggaacctcagtggctatctgctcctcctcatggactgatgacaatgatggtcaacgcttaggctggacctgccacgtgccaggcaccgctccaagagctttatagaatcagctcatatcatgcttccagcagtcctaggaggtggaatgttacactcccattttccgataaatatccctgaggcacagagaactgaagtgacttgtcttacacacagctgacaggtggcagagctgggatttggaccagggtgctccccaaacatgttcttaaccactacatgtacagcccagtaggtgcgtttggaattctgggttctgaaatgaagtgttcccccactaggattccctaggaccagatgagggcacacctgttaggcaggaacatggagaccaacgaggcaagagggttggccacaatgctgagggtggcagccaggtggtaggcaactggcccataggacaggcaggagtaggtctgcacagagggcagcatgccgttggtgagcgcgttgacgaaggccaccagggtatagatgaaggccaggtgcgccgggcagcagggggctgctttctcctctagatacccctggccctggctgctgtccaccgtgcctgcagggcccaagtcattctcttcccgcggccggatggagtggagggtgacctggtcattgaggaggtcttccacggaagcctcccagcacctgggttgacgctggaggacaaagaacgccacgaggcagcaggccatcatgatggataggaggaggaagaagaccaggggtgagaagtgggcgggaaggtagcggctctccaggtgggacaagggtgcttccattccggggagggcggacaccaaagctctgggaactccctgcaaaggacaagacagatccctggtcaggggaggggatcaggctgcagaacaacaatcatgacagtgataacagaatacagatcacctgttattattaatggataatgaataaataaacataactaacaaggtggcaataatgactgctcatactgactgcccactgagcacgggcactgtgcatggataagcccctatgcctcctaacagggctgcacagtgggcaccatcatcccccattttagagggaactgaggtatcagaatgcttcgtcccttacctgagggtcacagggagaatgtggcaaagccagactccacctggtgctttctgacttggaagctacaccttttatcaccccacagcagtggcaaccacaaacatgttcagaggaggagctagctggagactgagcagtggagccgcccacctaagaggagagcccccacctaaggggagaatcccccacctaaggggagagcccccacctaaggggagaatcccccacctaaggggagagcccccacctaaggaagaacactgctccacccatcgtctaggaaataagggccttcaggacatgccatcccaaaatatgactgtaggaggccagaatatgccaccccaaaattgacctattggcatattttttatttctagctggttattttgaaaaattgcaggctaaggagtagctctgaaaagttgccattttgtaagataaatttacatctaaaggaaatttttattagtaaagctatcttatctgtaccaagaaaaggtatctgtaccacgaaggggtatctgaaccaggaagagaaaggtgatggcctttatcacccgaggaacttttatctgcataacagtgcaatgtttattcaccataagtttcctcccttcactctcccataatttgtctccaccatcctgcagtagcctcaagcccctattcccttttgtagctcaggatgctatagaagctgaaatcatctggcccttttttgagtctcatattttttggggactcccatgcgtatgtatgtaagtaattaaaatgagtttcctgctgttgatctgccttatgtcagtttaactcataggccgaccaaagaacctagaaggatggaggtgagcagtttttccctcccctacatttgtgataaagccaagtgctgagatggctccgggtgatgctgggtacctgtgcgatgtcagtctccctcgtgggtacagggcttggtacgctgtctgatatctcagtgacattgacgcaggtagtgagaccggagccctgggcaagagccaccagggcgggcaagaggccgctgagtccttcacccacaaagaaggtggtgaggtagtaggtgggcagccggctcatgaacggcaggaaggtcactgaagaggtgcagtccaccagggccaggaagaaggtgaggaccaagaaggcgatgctgtggtggccgtccagcacccaggaggtcatattccagaggaaggcaaagatgatgcaggtgacggttcccacgcccagcagggtgaagatgatgggcacttcggaaaggcagctgggccggaagtgatggagcagggtgaccaggaggggcccgatgttggccagctggatgaccaccgtgaggtaggagggcaggtaccagccctcgggcagctccatcaccagcaggggcagctctacccagagcccattgatggtcacccaggagcccattccgaagacgcagaccagcaggtgcatcaggaaggccatggcggtatctgccctgggccagaggctttctcagatcagcctgcagcggggctggcagagaaggacaccaggtgagtaattccagcttcaccacctagcaagatgctgggacctggggcccagagttttctcttattactccccttcctgtgaacaagctggcttttttttttttcctttgagacatagtttcactcttttagtccaggctggagtgcaatgggatgatctcggctcagtgaccctctgcctcctgggctcaagtgattctcctgcctcagtttcccaaatagctgggattacaggtgcatgccaccatgccagctaattttgtatttttagtggaaacagggtttccccacgttggtcaggctggtctcgaactcctggcctcaggtgatccgcctgcctcggcctcccaaagtgctgggattacagtgtgagccaccacgcctggcccaagctgtctttttattagcagaaaacaagagaagcctttcctaaccgtgattcatgaaagaaaagttcaatccgacacacaaaagcaaacaaagcagcttctgcaaaagataccaacagcaaggtcaaaagttaaatgaaaacacggggaaaacatttgccacataaatcacagacaaagggctcatcttccttgtcaggcctctgagcccaagcctgcgcgtgtacatccagatggcctgaagtaactgaagaatcacaaaagaagtgaaaatggccggttcctgccttaactgatgatattaccttgtgaaattccttctcctggctcagaagctcccctactgagcaccttgtgacccccacccctgcccgccagggaacaaccccctttgactgtaattttccactacctacccaaatcctataaaactgccccacccctatctcccttcgctgactctcttttcggactcagcccgcctgcacccaggtgaaataaacagccttgttgctcacacaaagcctgtttgatggtctcttcacatggacgcgcgtgacattcctaatatataaagagtttttaaaaatcaagaacaaagagaccccatatagaagagggccaaggatatgaacaattcagagaaaaaggtacaaataagctttaaacacatgaaaatattatcaccttcattcacaataggaaaactactccaggtgccatttctcaccatgagattgtcccaaagcctgacaaaatgactcatgttcaaggttattatagattgcgatcttgttggtaatagcaagttatgggaaattttctcctgggtggctaccaacagagagggggctaattaaagggacctgctggaataccacatacctgtttaaaggaataagaaataaggaaagcagatcttggtgactgataaggaaaggtctccaggctataataataatcttgaaacaaaatcaaggcaggtaaatggaaccaggaaaaagtgtactgccttttggtcatagaagaggaggaaaaacatgttttctttgcttgtacttgcacaaagcaacccttgaaggacacacagggactgcagggatgttggtgatgcctctgtatatcttttttttttttcttgtgacagagtcttactctgtcaccaggctggagtgaagtggcacaatctcagctcactgcaacctctacctcccgggttcaagtgattctcctgcctcagcctcccaagtagctgggactacaggcgcccaccactacgcccagctaattttttgtatttttattagagatggggtttctccgtgttagccaggatggtctcaatctcctgatcttgtgatccaccctcctcagcctcccaaagtgctgggattacaggcatgagccaccgctcctggccctgcctctgtatatcttttaataagagttttgatttgtgaaccatgtaaacatattacctgatgcaaatatatggttacctgaaataagatttcaatctggctttttttcctcctgaaattatatcactctctacgtggcctttggagaccacttcctctagccctccagagccattctgccatctgtttacccctttgtcagctaccagtggcagcccacctgtgctgttactaacaactttcttctatctatccttagtctgagcagtaatatgggagatgccaggagtgaggctctggagccagctgtttgagtttgaccctggctctgctgcttacaatctgggtgaccctgggcaagtggctttgcctctctctgcctcatctcctcatctgtaagtaggggatagtgatagtatgaactccgtggtttgttgtgagatataaggatgctggtgagtttatgctgtttccaacagtcccagcatagggtaagcacctctaagggttactgatcattatcgtgaaatggcaggtttggtgacatcgttatttttgtctaattcacatgagaattaatacatgactatgaaaatttaaaaaaggaaaagattcccctactaggtatcaagtgaactcaccagtggtatatgcacctttttgtagagacacgctaactgggccaatcttcacgttttgtagatgggagacgaggtccgaaggggcagaggggctctcctgggatctggactggatcctctgcagcaagcggcctgtccgggactcctcagttcacgctgcagtctttaactccatacttcttccttctagtacaaagcaggagtgtccgttgtggccacgcctcacccaggaaactcctgaatcctggcagctcctccccacggttcccacacacggaattccctcacagggctgggacttccttcctcataccttcactgagcgaacccaatgctcagtggcctttctggtcacctccttttcctctctgggaggagccactcctggggtgtaacgcagtcagatcccctagcagtcccgctctgccccctcccttctgggggcctcagactccattccctcccttaggaagctgacttgactaatagcacaggtgaggcccactccaggcgtgccaagaggacccaaggagggaggggaagctcccagacagcagtggcacacctttgcctgtgctgtcctcccagcctggagcaccagccccctctgctgtccacatccaagctttctacaagactccgtcctccaggagacctctggctgcctcaccttctcaggcgtcctcaccagggcccatgaccccttcatttcaggttgttcttgtgtgggtgcatgcaggcacataccttgagactgaagctttttgagggcaggggctgcttgggaatctgacattttgaaggtggaagggcctttctcaatgacttagcttaggatttgtaaattgttaactcactggccactgccagacagcagatatattactttggtttgcccagtgtgtttaacaatttgttactgtaatcagcagtggaggggatggcaagcaaccttcagcatttctggcttctcaggaatattttggaagaagtggccccccactttggcctctttctctgttctagactcgggccatcttggagctctcccctgcggtaacatctggaaccagttgcctgggttcaaatcccagcttcaacccttacaagctgagcaagtgacctaacctcctgtgcttcagagtcttctcttgcaaaacagctataggctgtcagtaccaacatcagaactgttgctaggaacatgcactaaagtgctaaaactgtgcctgccacatagtgagggctcaatgaaccatcattataagattactatttcagcaaacgtatcagttgcattcaaaaacatgtagttattggccaggcgcggtggctcacgtctgtaatcctagcactttgggaggatgaggcgggcggatcccttgaggtcatgagtccgagactggcctggccaacatggcaaaaccccgtctctactaaaaatacaaaaattagcccagcatggtggcgcacacctgtaatcccagctactcaggaggctgaggccggagaacggctccaacctgggaggtggaggttgcagtgagccgagatcatgccactgcactccagcctgggcaacagagcgagactccatcttaaaaaagaaaaaataaaaaaaaggcgcagtttttgttagacaaatggccactcaactaaaggactacatttcccagccttctttgtagctgcacatggccatgtcatcaagcacaggccaatgaattcaaatgcgactttgagtagtctccttagcccgtttcctgtttagaaaaaaaagtgcagctcgttgccagcactcatttaattttatgtaaacgtgctatttgaggctgaagcaaatctgattctgactgctgttttttttttttttcttttgagacagagtcttactgtgtagcccaggctggactacagtggcttgatctcggctcacagcaacctccgcctcccgagttcaagcagttctcgtgcctcagtctccttagtagctgggattacaggcgtgcaccacaatgtccggctaattttttatatttcttagtagagacggggtttctccatgttgccaggctggtctcgaactcctgggttcaagtgatccccacgcctcagcctcccagagtgctgggattgcaggcgtgagccaccaagcccagccctaaatctgactgattttcaatgtgaaaataacatgtaaaaactgtttttgaagttatttctaaccagaactaacatcagactcatctatttcagaaaaactggattcatcaaacgaatctttggtcaacaactgttcaagaacaatgttaacatcacacataggaatgctaggatttgctattttcagcgatcgagaattactttgttttgtaaatggaaataccacgactaaaaccagaatgctacaaatagagtgatgtcttttgtttccaaagtcaatatactagagcaaggcaaaaataataataaaagcgaggtattttgtggcaaagttatcttggggtaaacactgcagtcacaagtgggtattccttctggcaaacagggaaagagttaacaataagggagtgtgcccttctgctcttcctccatttggctgtctggaatcagatgtgatggccagaactccagcaacgattttgtgctatgaggcatgtggtgggggttagatgcatactaggctcctttgggattttgtggcagagagcacccataccagccctgttttgcctgtgttgaactgttttgtttgtttgtttaatgttgttgttaaattgtaaaagaaacttctatgttgtttaagtcactcttattttatgtacaacaaaagtactcagaggctgggtgcagtggctcactcgtataattccagcactttgggaggctgatgttggcagatcacttgaggtcaggagttcaagaccagcctccaactggtcaacatggtaaaaccctgtctttaccaaaaacacaaaaaattagccaggtatggtggtgggcacctgtaattctagctactcgggaggctgaagcaggagaattgcttgaactcgggatgtggaggttgtagtgagccaagagcacgccagtgcactctagcctcggcgacaaagcaagactcttgtctcaaaaaactaaaagaaacaaacagacaaaaactactccatactaagtgcacagagatacacattccaggatatatattgaaagattatagtaaccaaaaactaatgaatacatttatctcctttaccacctactttctgactctgaaacttaggtcctgtcccaaccaggatttgatcaaaaatcaaaatttaacaaaagtagttgtttagacccttgggggcaaatgtcttgcagagatatgaaaaaaaaaaaaaaaaggagaagagagaaagagggaggaacagaggaacacagaaccctccatatagcatttggtaccaaaagtataaattgagaccaagagtcatttcatatatcaaaactctaattcataaaggagtcaaaattgtagtgactatctgtattctgaatatttcctgaaatagcctcagacattccaggagaaatggacagaagcacagtccagcagtacaggcctgactcacccttccaggtcaagacagcagacgaaggtgcaaaataaacaaggatatagcaaaagcaataaatgatatacctagtaaagagggctaagtcagtagttaaggggagtaggcgaatttgcagatgatggtgacctttgccatatgaaaagctattaaactaatgagagtgtccagttaaacatttacaaacatcagtagctttcccacagagggctggatggggagatgagggcagacagggcagaagtagcctcactttcttgtatgttcgacaactcctaagctctgaacgcctaaatccctgctccccacaaagacgaattctctggttttgacccaggtgctaccacggctgtgtcacttgagggatgggatttggctccgggggtctgtttccttgtctggaaaccaggcacagtgggggtgtgtccccacgtgacccatctgccctatggccctggcccactcccaaattatctccttcctcaaaagtgaggtgtgcttttggacctcggggacacagtgaggaacagtcattaatgtcaatgaaggggatgtcttaggcagagggaactacatgtgcaaaaaggccccagagaaaaggagagactcagaatggctggtgttcggaatgtgttgggatacttttaaaagatgcatatctgtattttctgttttttttttttttgttgttgttgtttgtttgtttattttacagtgaccttgcagttcttatttattcattttaaccagtatttcttgggcaccaactgtgtgctcaaccacaatccctgctctcaggaagttggaggaagcattcacgaagcagaataaaaaacagaaacatagagcaggtcagatggtggcaaggactccggaggaaagcaaagctcctgaatggggaatgtgccgctgtcaaggagaggacatgaagggagtgtgggagtgagctgtctgcagaaagcacggtccaggggagaaaacagcaagtgaaaaggccctggggtgcggccacacctgctctgtcccagaagtggattttgctgttcaaaggacagctaggaggccagtgtggccgcagcagcgggagccaggttggaggggaggagacagggcaggtcccctgtggccctgtggtgacagcttgggtgttttctctagagcaaaaagctccgtgagtgggcagaagagaccagctctaatctagtttttaacaggatcgtgctggctgttgtgaggagaaacatgaggcgccagggaggaagcaggagtaaaccttcggagggttaggaagctgtagcaaaagagctaacaatcaccatgacaacagtgacaaccatagctgccactcctcagctatttattgtgccagaccctgtgctaagctctttgaacacattacctgtcaaatcttgttccacaatcctgaggctggcattatgattatctccattttacagatgaggaaactgaggtttaaaagggaaataaatttgcctagggtcatacagctgggagctgagctttacatccaggcatgcttgactgtggacccagccctgagaaaggcctcagggtgaaggggttctgaaggggccatgggggtcaagctgagcaggatctctttctgctcacagatggcctcccaagacttgggccagagaaagagagaaatggggtacaggctcaggagaagctgagagaggctctgagacatatctgcttcccaaggatccaggaccccttatgtgatcaccagagaccagaaacctaaggcttcgcatgagacagttaagatgccccataatgcgtgggcgacagatagagaagctagaaggatcagttccaggcaaaggtttctcttttgcattcttgcatcaaaagctgtgagcccccagcccaagaaagtgaagagaattgggagtggggttctgaccagggccagtgcaccgtcattgtgtgggctgggccatctcctccagggagctcaggcagcttccatcccacccaatgtcccccgcccccctccacattctcctgccctctgttttcctccatcaaagtattactgacaccagctcagttacgggagtttatctgtgtctatctgttgagcgctggtctctcccattggagtgtaatctccatgtgagcgggggcttgtcctctcccccagtgcccaggtgaccatctggcttgccacgggctgggccacctgagctcctggcaccatggctgggttctcgctctgcagggataatctgccagctggtaggcacctagccctgtgggccagactggaggaaacccgcctcagctatgagggttgtgttggccagggtgacccctggggcagtgccaggtggcagcctgacactggatacatctcactcctgggcaagggtctgagccaattctttcctgggttccaggctcctggagaacttagtgaggcctgtaggcgtctacttagggcctggcctcaccctcatgagagtgggtaggaatggactgactttgagcccatgaagaagggaggctgagaggtcaaaaccacaaaacccacagggagagatgggggagatgaaggggagtgagagagaagagactgagacaaagagacagaaagaaccgaaagctagaagcagaaatggggagaaaggacaacagaggcacagagacagggaaaaatgagaagctgcggctgagagggaggcagggaggtgccaggaggcaggaggcagctggggcgctgggagcctggcctcagccaccctcactgttcacagccacatgtagcagaaggccatctctacctcttgttgctgggacctcagagttcccctgaaactcatcccaactcaatgtccctattgcacaggtggggaaaccaaggcccagagaggagatagtgcttccccgaaccctgccccacccctgatctcaggctgtggcagacattcaggcctgtgctcaccggctgtgcaacctcaggtcagctgctcaccctctctaggccttggtttctccatctgtgaaagggtctgggaatgcccagcctttctgggctcagcagaccaggaaaaagggaatgagataacaggcgctcagcctggccagtagaagcggacagtgagttctcttcccccttctcctccctcccaaggccaggaagggcttcaggcctcccatggggctgaccttggtggagcagcctcccccaggccagttcccctcccctccacgtccatcccaactcccagcctccttcccaggctcctgcggcttcagcctggtcaagttgttccgagatagcatggagatggccctgggtaaagtcagtgggggcccagtcttttttttttttttttttttttttaagacaggatgtcgctctgtcacccaggctgaagtgctgtggcatgatctgagctcactgcagcctcaaccttcctggctcatgcgattctcccacctcagcctctgagtagctgggactattaacccatgccaccacgtccgacctgggtaatttttgtattttttgtatagatggagtttcgccacgttgcccaggctggtcttgaactccctgagctcaagcgattcacctgcctcagtctccagaagtgctgggattacaggcgtgagccatgacacccagcatgggcccagccttttggtctggaggcaccaggggtctggaattcacctggatggctcagcctgtcccgactccaacatgccagctgaggaggaaacctttcttccctcctgtccctttgatctttcacctggatggctcagcctgtcctgactccacatgccagctgaggaggaaacctttcttccctcctatctctttggactctcccgacatggcagcctgaaactaggggaaaggccacgggacacctgctggctccagataagtgcccctgccatatcctggtcagtgtcccatgctcctagctagcaggcagccttggtagctgcagctgcaccctcacaggcctgagccgccccgctttgcccacttacctgctggtccagttccccagccgctctgcatgggaggggccagaggcagctcgttttgtataaagctgtccccgcccagagctcggggaaaggcaggcggagggtgggtgtggctcccggcaagaccaggcgcctactatgtgtctctgatctgccctacagcccagctaggaggaggatccagatggtagaactgtataataaagggcttgctttattgaggctctctgccacccagatttcatgagggttgatccccagttgacaaaagctatgtgcaaacagttggttctggcatcaccctgagatctccataattcctttcacacaggaagagagttccctggagcaaaaacagttcaaatactggtgcttcagtaagtcatgtggaaagcggggataataatagtgccctcttcataggacagaaatcctaactgccagtgtgcactgagctgactcagtgtcaggcatgttcttggggcttgagagaaattaatgcatttaatcttcatggccttttggagagatgctattactatccctattttccagatgaagaaacaggcccagagaagtcgagagccttgtgtaggtcacacaccttgtatatggcagaactggtctctgatgcacactgagctaccctgacaaatactgtaaccacctgaggggttctttctgcccactgcataaagaaagaccatgaggctggccatgccacaggggaaatgagtttgttcccaaatcatcttcaaagcttgtaggtgaggggtttttcaaaggcagtataggggaagagttgggggtggccaggtaacaggtgcttgctgctgattggttggggtggagatgaaatcatagggggttgaagctgtgctcctacaggctgaatcgcttttggggggggggccacaggagcagggttggcggtcctggtggagacatcaggtttaggtggagccatgggtgtcaaatctgcaaaaaacctggaaagatggcggggcgtggtgggtcatgcctgtaatcccagcactttgggaggccgaggcgggtggattacctgaggtcaggaattcaggaccagcctgaccaaaatggcgaaaccctgtctccactaaaaatacaaaaattagccgggcatgatggcggacacctgtaatcccagctactggagagactgaggcaggagaattgcttgagcccgggaggcggaggttgcagtgagccgagatcgcgccgttgcactccagcctggacaatagagcaagactctgtctcaataaaacaaaaacaaacaaacaaacaaacaaaaaacaaaaaaaaaacaccaactggaaagatatctcaaaaggccaacctgcaacagtggtgttatttgcaggagtaattggggaagttgcatatcttataacctccagaataatggctggcaatcatttatgtctacaccttaggaggacccaggctcctcttctttccccagcctgatggcctctcattaactttacaaaagtggttgctcacagtgctacggcctgtaagtgcagggccaggatgtgaatgcagactcaaattggtgcctccatggatgtaaaacatattgcacagattctgacacctagtaaatgctcagtgcatattgacttctacaaataattctggcctgcctgttgtgttattttccaagacattcatttacttaacaagcaatcaatcactctccaggctaatgcttggggcgagaggtgagcaggcactagggaaggggccagacccctcgcttagcaggcaggtgttcaggaagtgttgccactgttggggctcaggacatacacacccccaaaatatgactctgggaaaccagaatgtgccacccccaaatacacctctttgacatactttgagctggttattcagagaaactgcagacacaggagtagctctggaaagctattctttggtaaaagaaatttacatctatcaaggaaatctacattagtaaaggtgcctgtatcaggaaaaaggctgctccagaagaattaccctagagactttcttttttttttttttttttaagatacaatttcacttttttttgcccaggctggagtgcaatgctgcaatctcggctcactgcagcctccgcctcccgggttcaagtgattctcctgccacagcctcccaagtaactgggattataggcgcacgccaccatgcccagctaattttgtatttgtagtagagacaaggtttcaccatgttggccaggctggtcccgaactcctgacctcaggtgatcttcttgcctctgcctcccaaagtgctgggattacaggcttgagccactacactggccaccagacagacttttatctgcacaggaagacaaccattatttaccatacaataattcttcccctcaccctcccataactgtgtctccgccaatcccccaaagccctaagaccctattccttaaacttcaatcatctgacccttctttgagtctcatattttgtgggatttccacgcacagatatgtaattaaatatggtttctctcctgttactcagtttcatgtcaatttaattcatagcccagccaaagaaccatgaaaggtggagggaagccatgtttcccttctctatagtaccaaatactttggatctgttaaaaaaaaattgcaggactctaaatttatgatgccaagggagaagttaagccttgcagagtgtgagttatgtggcttgcaggatggccactttcttcttctttttttttttttttgagacggagtctcactctgtcgcccaggctggagtgcagcggccaggctggtctcgaactcctgacctcaggtgatctgcctgccttggtctcccaaagtgctgggattacaggcatgagccactgtgcctggccacaatttcatacttatctctgccaaatactataaggtgtcaaaatttggcatagagggtacaaaactataactcaatccaaacagaataatctttgcttgtataattttttaataatgaaacatcaatattggtttaataaaggcagctatatcttgaactatttagttaaataccctaacttctaatcctgtggccttaggaagtctagtctacagacgtgaaggaagtttctttagggaaaggacttatcatctttgatattaaagaaaagagaatttatataaaaataatcttatatggtaaattcttgttctaaagtaaatgaattggttgtttaaaaagaaggatgtttacaacgagtcagaaagttgaggcatgtcagagattgtgtaaattgtaaaaattttataaaagggaatttatgcaagaaatgttgtacagtttaaaagtgatgagggggccgggcacggtggctcacgcctgtaatcccagcactttgggaggccaacgcgggtggatcacctcaggtcaggagttggagaccagcctggccaacaagatgaaaccctgtctctactaaaaatacaaaaaattggctgggcatggtggtgggtgcctgtaatcccagctactcgggaggctgaggcagaatagcttgaacccagaggcagaggttgcagtaagctgagattgcaccactgcactccaggctgggcgacaagagtgacattccatctaaagaaaacaaaaacaagagcgactaggcctcctgaatgctttataaaatgccaccataactcttaactgtacaacttgcctgctttgtagctgggtaagacctagcacacatggagttaaatgctggaataagtcagaccttatctgcacttctgtctaggtcctaggctctacatctagtacataattacaatctcaaactgactaacaaaagtaaaagttgctaaaagttaacagtgtaacatgtattgttccatagaaagaatctaagataagactgtaaagctgaggctagccgtggaattgtaccattaaatacctatgagtttcctcttgaggttgcaagataacctagggttcccggcctctcagaaagggcattctttgcttaccacagatcagaagccctatacagggactgtgtacacaaaatataaggccagtttccaagggctttcttggcttcgtaaatcaagtttgattccttaaaggaaagcataccattccagtcaaggccttggtaaaaaaaccagtttttccaattgtgtcctgttacaaaagaaaacagattcttattacacttgtgcaaataactatatcgccataacttaagaatactcacagatagtttccaaattctggagaaaatcagggagagagaaacaagtatgctacaaattttgttcatgggagtatactaaattgttaaaagctgttaatagctcaaaagaaaaatttcgaggccggatgcagtggctcatgcctgtaatcccagcactttgggaggccgaggcgggcggatcgcctgaggtcgggagttagagaccagcctgaccaacatggagaaaccccatctctactaaaaatgcaaaattggctgggtgtggtggtggcacatgcctgtaatcccagctactcaggaggctgaggcaggagaatcgcttgaacccaggaggaggaggttgtggtgagccgagactgcaccattgcactctggcctgggcaacaagagcgaaactccgtctaaaaataaaataaaataaagaaaagtttctttgactttgaaaagcaaaacaaagtattagcaatattttaagcaaaatatcaaaaagatcactccagtctcctattagttcagttcgtgcagttaattcctgtcctgcttgatattaatgaacattttagctaagagtcctaaccatttttcctgtattctgatgtcacaatctccaaatttatcagaaacctgcattcaagaacacctgttagagctttatagctgagtataaaacccttctaaagaggatcaaaacaagacaacaattgtttatggatgaccaaaagttttagggtagccatagttaaagacacaattgacaaggaaatctgttacttctgtggcacacaataattttaacataacaattataattactactgataacacacactaagacatatcagaattataggagtctcccataactttggaacacataccaataacatatttatacaaatatggcccaaagaaagccaaacattattttatatttgacaatgcttcctgtatgacttcataccaaataagccaaattttacctttatattagtgtgttattaatgttaaactcaattttaatgttttgatcataaggtcagattttcatggacccttttttttttttgagacagagtctcgctctgtcgtgggcgacagagtgcagtggagcaatcttggctcactgcaacctccacctcctgggttcaagctattcttctgcctcagcctcctgagtagctgggactacaggtgcccaccaccatgcctggctaattttttgtgtttttagtagagatggggtttcaccgtgttagccaggatggtcttcatctcctgacctcgtgatccgcctgcctcggcctcccaaagtgctgggattacaggcgtgagccattgcggctggcctatagaccatttttaaccctttataatttttgtcaaagagcaggttagtgctttaagaaaaacccattgtgcttttattttaatactcaatttacagaaaaactggatgatacacctttaactttagccaagatgtttacacacagtatttcctttacaattaaccttccaaaagttgcttaaaccttcatttttattttattcaacttaaaacaattctttaaccttttaatctaggtaaaaatccacattctcatgcctccttataatctttttaccaaaagtatatgtaaactgttttttcaatagtcttaaatacatgttacactgttaacttttttttttaaggcctacgtaacaaataattattcttggctgggtgtggtggctcacgcctgtagtcccagcactttgggaggccgaggcaggtagatcacctgaggtcaggagtttgagacaagccttgccaacatggcaaaaccctgtctctacaaaaatacaaaaattagctgggcgtggtggtgggtgcttgcaatcccacctactcgggaggctgaggcaggagaatcacttgaacccgggaggcagaggttgcggtgagcttagattgcaccactgcactccagcctgggtgacaagagcgagactccatcttgggggggaaaaaatgggaaactggagagagaaaattacatttcagaaactataacacacctgttattaaattccagtgttgcctaatgttgttcaatttttattactttaaattaaattctaatttttctgactacgagtttccaaaataagctttgttttcttaaagccctatgaactgaaaactagacgtttcagcaggcactgcctctaaacgccccccagccatcacaggaggaaacctcttcactgctggagctgacaactaataactgagcgtgcctggaatcctttgcccccacatctaataagtccatggaacccagggtaattgagatggcatctcttacaagaatcaacttctgggtcaggtgcggtggctcacgcctgtaatcccaacactttgggaggccaaggtgagtggatcacttgaggtcaggagtctgagaccagcctggccaacatggtgaaaccccatctctaccaaaaatataaaaaagttagctgggcatggtggtgcatgcctgtaatcccagttattcgggaggctgaggcatgataatcacttgaacccaggaggtggaagttgtggtgagccgagatcgcgccattgcactccagactggcgacagagcgagactccatcttaaaaaacgaaacaaaacaaaaaaacaggaatcaacatctggatacattacactcgagtcaaagcctggaaagctgaggaagcaacccctgatagccaaaggaacatcctaaatatcagtgtaaagaaataggaaattttaagctcataaaaggtaagtaactgagtgagaactacttatcttactcagtctcacccctacctcaccaaatacttttagatgttcctacctctccttttaagacaaatattaaaactttttaatggaaattattcactacaccaccattgtgggaactgctttacacactctattatttgcagtgggactatgtactacagcaccctcaggatggaatatcagacagagaatctcaattatggtaccattttgcttaattattatcctcatagcaggaataacagttactaacagcaaataacacatgggcctttccagacatgtgcctctgcctgtcattgggtgaggaatgttgtttctatatcaaccaattaggcctagtaagaggtgctgttgaaaaacttaaggaaagggctataccaaaacaaccaaatagattcttggtttaggaacaaaatcatagcatgggtcatcccattcctgggacctttcctaataatatgcctaggactaatgttcttaccctgcctaattaacctttttcaaagatttttaactgacaggatcatggccatttcacagacaactacccaaaaacatccacagacagcgttactgctacagttaatccaagaccagaaaactctgtcccctcatcagcaggaagtagccagaaagaacaccctgcctttcatcctttttataactataaggtctggattgacagagcaggagcattgccatcttggacaagcactgccattctaaagttccccttgatcaaaaaccacctaaatccaaagggcatcagcctaatggctaaggtcagcatgaccataaaccacaaatgacatctctgaccagaaacattccaaccataagttaaagccctccccgaccagagacgtgccagccccaagataacctcccctccaggtggagagatgtcagccccaagataccgtcccttccaaccagagacattccaaccctcaatagacttctcccctacacaggaacattccaagcctgtgataagctctcttacccagaaaccagtaaatacccttagtatgtaagagagagcattcctgactgaaattggacagaggcccctctcaggtttattcttcaaaataaacctgtctttgactgttgagcctcttttcatgtttctttcctctttcttgaactcttacaacacctttgttaggcgcaaattttcagtgctgcaaaagaaatagcactcgaacataaatttaattttctcagcaaggcaattttacttctatagaagggtgtgacttgtggatggaacaatggtgagagcacacctgaacaagggaggggaaggggtttttattcctgatgcaggtagcccctactgctgtgtggttcccctgttgactaggattggaccacacagtctaagctaattccgattggctgttttaaagagagcaggggtacgagtcggagtagcggagtgagtagtttggcgggaaggacagttaggaacaggtgactaaaggtgactcaggtcagtgcaggtgaccaggggtgactcaagaaggagcaggtgatcaggggaatagatgtgaactactgattagaactggtggaaaaggttgtttactgaaactaggggcaaggaggcaaagagaatgagaaagttaaactttaaaatggagaacaaagaacaggggacctgaatatactcatacattggttccttggagaggatctcagaactcattgtacttaacaatttacaggctgaaacatttgaaaaggaatttgttatatcctacaatttccccctttcaattttcatagtacttcctcttcaaactttttaaacatgtcttggcttagctgctcgacttaatcctctaaaagaaaaagcttatctgaataaggtggaggtgagttaaggaagattttagtaagtgctgcttttataagtctttgcactagcccacagatgcatggtatgacataacacctaacaagaatgagtacagctattacggctgcaagagaagtaagaattgaggctgtgatttctttccatttactgaaccccctttctagccaccctgagaaagggttatcgactccagaattttagctagttcattggatagagtggtaagtctttataaggcccttgttatgttcccagtgtgggcagtgttatttgggataaaggtacaacactgagttttaatcataatacaaacaccactttttctgctaatatcatatctggtgccattctgttttcccaggccatctggctagtgggccccaattgttctgctatccctttgacagcatccctggtgtaattaataaactgctgctgattataatagatgtaatttatccagtctacatttttattaatcgtcacccatgaaaatattgacttaaatcctgcagctatttgatctcgggctttaaattcatctggtactcctagtggaactccagtaatgtttatataaacatgggggtcaaacgactcatgtaaggcacttcttttacaattttcttttttatcatgttgacggaatgctagagtgaaagggatggccaattggactagagcacgagtgctgctctaattgcttggcagagtatccagcaatagtgcccctcaatgccaccacacacctgctcagggatgaacaagggcagactgatgggtaagctcttgaaaaggcttggtttcaccgcaccctgttaagtctccaaggaatgctaacttttccccctgccgtgaaagggacaggtgaacttaacatcaggggctggaggctggatggccctccgggctgacccacagggctcttgacctcggggaagagcagtgaaagcgaacagcagtgaaagagttttgcctgactcattgccccggctgtggggttctggaagagagctaccatacagctcatgccctgtccatgagaggaccactcgaggggaaaggggacaatttgggtctctggcctgcctgtcgcacaagcagtcacttttgtttagcatgcgaacagaatatttaatccatttcagccaagcatttacatcctggtactctgtttcaattgctatagtttgttttaaatctataacttctacaacagctactttggttttatcattgggtatataacgaaagaagatctggttagtggagaacttaggagtgggagaagggggtgcaggagttgaggaggcaatgaagcacatttcaaaggatcctctggggtccttccctgagacttctgctcctataccatagaaacggtactctggggagcagaggtggtaatctgtactggattacattggttcatctgacaatggggtggtccatccttgctccttggtagtccataagccattagaccagctaaaagttctgttctaggagggcaagattcctagttcatactgggaccatcatcaatatcttcccagactaactgatcccagttaacagattttcagtctgaggagagccaggaaggacaaagatacttttctgaaggggagagttgcctctggtttggcagatctccacaggtcatcccaaggcaagcatcaaaagtaatagtttggggcgaacttgttacataaagaacgagaagactagcaatagaaggggaaaagaaagagatggaatgtaagaggatcaaacccgttttagctttagcttggttggagttggccctggaatagctgtccatgattctggagggggtggtgctcttttgacctaggtgtgatgagtccatcctctttctgctgtttgaactgtggtctcggtggttagaagcaacaggtagggtccttcccaagccagttcgagtttcccttccctccaacttttgacaaggacacagtccttaagctgatgttggtgtactggaaactgtaggggtggtacctgttctaaaagacctttagttctgagggaagagaaagtggaaaataaaccaagtatataatttctgagaaactcatcttttgttttgaacataggaatgtcagcagtggagtgtaaacagggcaacctacacaacatttcataaggggataagccaacatctctctgaggagcagttcagactctcaagagggcaatgggagagcatctatccatggcaaccgagtctctaagactaatttggttaggtggccttttttttttttttttttttttttttgagagggagtctcgctctgtcgcccaggctggagtgcaatggtgccatctgagctcactgcaacctccacctcccgggttcaagtgattcttctgcctcagcctccctagtagctgggactacaggcacgcgccaccatgcctggctaatttttgtatttttagtagagatggggtttcaccatattggccaggctggtctcgaactcctgacctcgtgatccacccgccttggcctcccaaagggctttttttttttttttttgacagggtctctctccgtagcccaggctggagcgcagtggcgcgatctcggctcactgcaagcaccgcctcccgggttcacgccattctcctgccaaagggcttttttaaaaaatagtttggttcattctttccactcttcttgatgaaggtaggtgccagggagtatgatattcccatgttatatccagtatctgggctaatttcttaatgacatgtacagtgaaatgagtcttattatctgaatcaatgttttctattaatctaaacttgagtataagattttcaactaatgccctgtctatgttattatcagttgtacttgaaaaggaaatagcttctatccaatgagtaaggtgatctactatactaataaatacttcagatgatcagttggaggcatctctgtgtagtcagtctggatactttggaatggccttaagcctggactccttcccccaaggggtaatgttttactaaacaactgtctgtaacctgtttggccagggtataaatcctatgcacccataaactctgatgaatgtgtcacacgaggcttggggcctccaatgggtcctttaatgcagttggaataagacttccctcataaggggtttggataacatttctctctggtctagcaatatccattttccttctgaattctctttagcacctatttttattagtttttaaaccaaagaaagccaaacaccattttatatttgataatgcttcctgtgtgattttataccagataagctaaatttcacctttatattagtgtgctattaatgttaaactcaattttaataaaatcttgtagacatatttattcaattttaatgtctgaccataaggtaaaattgttatagactctttctaacgcttcataatttttgttaaagagcaggttagtactttaagaaaaacctgttgtgcttttattttaatgtccagttcacagaaaaactggatgacacccctttaactttagccaatatgtttacacacagaaattcctttacaattaacatttcaaaacttgcttaaaccttcaaaacaattttttaaccttttaatgtaggtaaaaatccacattcttatgccttcttataatccttttaccaaaagtatattttactttccttacacgccttgaacataaactgtttcttcaatagttttacattcaggaggcctaattacttttaaattatacaacatttcttgcataaattcccttttataacattttccacgactttcacagaccatctttgacatgacttaaatttctgacttgtgaacattcctttctttaaacaaccagttaatttattttaggatgagaatttaccgtataagattctttttacataaattctccttttttcttaatgtcaaagatgataattgttttttcccaaagcaaacttccctcatgtctgtggactagactgcctaaggccacaagattagaagttaggataatacatgttacactgttaacttttagcaaattttacttctgttgaaaaccttgtaagtttggaattttaattaaaggaaggcttttttggtgtccggggacatggacaatagttatttttttggcaactgaaggttatttaatacttgggtgattaattcctcgtggaccgggtcttgacctttgctattaataagacctggttcagtccaaatttttccacatgcatgagccactccaaaggcacactgaaaattggtatagatggttccttcctggttctgtaagtactttaaggcttggctgagtgcaaacagctcacacgtttgagcagaccaattattaggcaattttcctaactctatctctacacctttaaccattgttccctatttctcattcaaacttggacataacggtatgtgaaaaagagcctcttgtgactgttacctctttacaatggaatgttaagcaacccctcagaaagtagggagtagcaaatcaaatctttgtaactacatttcagcctttgccggttgaaatgtcagagccccggcatcagaaagtggtcaactcaagggctgataagaagaatttaccaacaacagtataggtttgaaaagtaaagttttattagaaagaaagaacattgcagaagagtgcagcgaggtgcctcagcaagaggggactgagagggctgtggtggatattccttaggcgcatatatgaaccttaaggcaaaagcttgagggtaatttggagcatactagccacgtaggttatgataaatggttacatttgtagttattttggtgccttaatgtcagcaaggattgcacagtgagtttcgcatagaaattctggttactacaaaatttttgaaagacccctggaaccagatgccaactttagatatgtcgatgaagagtcaaactctgtaaaatatttgaagagatttattttgggcgaaatacgagtgaccatggcccatgacacagcacttaggagatcctgagaacatgtgcccaaggtggttcgggcgcagcttggttttatacattttagagaggcacgaggcatcaatcaaatacatttaagaaacacattggtttggtccagaaaggtgggacaactcaaagtgggaacttccagactataggtaaatttaaacattttctggttgacaattggttgaatttgtctaaagacctgggatcaataggagggaaatgtttaggttaagataaaacattgtggagaccaaggttcttttgaagtcttatagtggctgtccttagagacaatagatgacaaatgtttcctattcagacttttaaaagctgctagactcaaaaaaaaaaaaaaaaaaaaaaaaaaaaaggctgccagactcttagttaatctcagagggcctggaagaaaaagatctagctatattaatagagattatttacagatgcagatttccccccacaaaggacagctttgcagggccatttcaagatatggcaaagaaacatgtttttgggtaaaatatttttgctttcttctttgtcacataatgttatgccagagtcagattggaaagcaagtcagatatataggtttaaataaaacccatctgatgagaatttatggtttgtagggcatgactccccagaccccttagataggaatttcagcaaaataaaaagatcagagcttagtcctcataatcaagaaataaccataaaaatgggcaaccctatggagtagccattcttttattcctttactttactaataaattttcttttgctttgcactgtgaacttgccctggattctttcttgtgtgagatccaagaaccctcttgtggggtctggattgggacccctttccggtaacgattatacttctaaattcctcagataaggagtttttgtctcgggctgcttcagggtcaccaggtgatttttgctctcctcacccctttgttcagcttctctgtttttgcctatgtacacaactctcagatttggccactggggagagcaaagttatacctggtgaccatcaagcagaccattcagagacaaaactccttatcagaactccttattcagaagcaattagacttccctattatctaaagcaggcatctcattccaggcttctttcccccaaatttataagtaactagaatttctatgcatctctggaatgcatgcatatcaaaactcacggtgctgaaaatttgcatctgtaaagaatctctattaacatagctggatctttttcttccaggccctcccaatcctgaagagattaactaagagtctaacaccttttgatggtctgaataggaaacatttgccatctgttgtctctaagggcagcgaacataagacttcaaaagaaccttggtctccacaatcttttatcataacctgaacatgagtctcttgctgatattaaggcattgaaaccacctttgcaaaattattacagacagcatcattgcaggaatccaggacactggagtagaggatgttccatacctttgggttacaagccacccccaggaccttgtcctcattgcaaacaagagggtcattgtgatatggaaggggggcaggggagtgctgggtacagaaatgcagggttcctggtgagggctccacccttgggcctgtgcccacagacctaagtaagaacaggcactcctgttttcatgcctgaatgttgtattttccaagaccactctggcccaccacatccccttcctgtgtccatattgttaaatatgaattctaaatttctcttcaaagaattaatatgtcagtatgttcaattctttgacttctgcttttaaatttaacttcctcgtaaagcaacctttttcgattacctgctccaccctgactcattccgattacctgctccaccctgactcttgcaggttacttgctacctgctccaccctgactaattattctccaccctgcataaccatttttttttcccgccaaagcactcatcctgtcacactctttaaatctgccaattggaattagtttagcctgtgcagtctaaccctagccaataggggaacgacacagcagcaggagccttgtgcattagggataagaacccctttccctcccttgtccaggtgtacactcaccattgctctacctgtgagggtgcacccttctatagaagtaccttgccttgctgagaattaaaaagaaaattttatattcgagtgctatttcttttgcggcactgaaactttatatgtaacaatttgggggctcgccctgattacatttccctctggggcagtctctggttctctcttgtgaggagcgctccgccccctgtggcggcctcagccgggagaaatcagaacccacccagtgcgaggaacaacccgagctgtcagcaacaggggggaagaaaactggccggcaacctagcttaaagaatcctcacatactgcagcgacgactctgcgcacagagcaaggaaggagaagccgcgggagctggtaaagtatttccttggtggtcgggaccaaggtaagaaagccacgggggtggtgggcggtgaagtactccttggtcagggtggcttagaggttaaaaagaggtgagacatccccattggcggagattgaacctcacacaaacctccagtagtagaaaaggcaagaaatttccagtggggaaattgagcctcaccccaaaaggtaagaaatttccagtaagggaaagtgaaccttgaaccttatcccaaaaccatcaagatgggaaatatcccaagcaagacagggagcaagggggataaacatggtaacaaagatatccctccagatggccccctaggtctcatgctaaaacactggaaggataatgaaaggatacacataggaaaaagcaacaaatggtaaaatattgctgttttatttggagtcagggacccatcctcagtccctcaatcttctggtcaaagtttgggtcaaatgagaatgtaatgtgtcagcttctaatccgatacgttaatgataaaagtccagtgtctcaagaagaactaggctatgccctttgttggaggcaaggacctgccctcctatttctcttaaaaataaatagggaagaacccaatctggcacctcaaaatgaaaagtcagaggagccagctctcatgcctaaagactccagtgctgcatggtatcccctagaccatcttcccccactcagtgtccccaaactttcccctcagacagccactgccacctcagatcaccactgccacctcagatcctgttccaaattccccctctactcacgctatccctcctccttataaccctgactgttgggaattaccatcccaccagcctgttctctcccaacctaaagacccctctctaaaaagactccagcgtgaggtagaacaatgtaaaaaagatattcagaatttcctatttccctccgtacctaagaggtcagcccctaccctcttccctttgaaagaggtaccacaagttgggggcgggggggggggcattgactttgtaaatgctcccttaatcagttcagaagtccagaattttacaaaggagcttaaactgctgctggacgacccttacagagtggcagaccaaattgaccaattcttagaacctcagttatacacttgggtcaagttaatgtccatcttgggcatcctcttttcagggtaagaaaggagtatgattcttaggtctgctatggtagtttgggaatgtgagcaccctcccaatgaaaacgttcctaccacggaccagaaattccccgcccaggaccccccatgggaaaataacaatgcagatcaccgggaaaatatgcaggacctaagggagataataaaaggaattcaggaatcagtaccctgaacccaaaatctttctaaagcatttgatatacaacaggaaaaagatgaagggcctatgagattcctagacagactgagggagcaaatgaggcaatatgcaggcctcaatttggatgatccccttgggcaaggaatgttgaaactccaatttttcactaaaagttggccagacatttgaaaaaaaaagttacaaaagatagacaattgggaagaccatcccttaagtgagcttctcagggaagctcagaaagtgtatgtgaaaagggacaaagtaaaacgaaacaaaagacaaaacttatgtttttcaccttccaacagatggctccaaacccaggtacttctagatagagtttccagggagccagaaactataaagggtccgaatcctcttttaaagaaccccagcctccatctggaggaccagggtccttgtctaccaagccccctaaagagtatgggggagaagggttaaagaatcccagaactaaggggaggaaggacaaaataggtgctatagatgtggaagagcagaccacttcaggagaggatgttctgaactaagaaaggagaaagaagccctttcactcatgactttcaaggaagaatagcggggtcaggggctctgtctcttttatcttgagtcccaccaggagcccttgataaatttgggggtgggacctaaacatgagcttatcacctttttagttgattcgggggctgctcgctcctctgtttccccccatctaatgttgtctccttcttagaggaacttttagtctccagggtaaaaggtgtaggattaagagcaaaaattttagaaagcactgaagttagataccaggatcgctcagcttatattcagttcttgtttatccctgaagcaggaactaatttactggggaggaatttaatgttaaagttgggcataggtctacaagtcagcccaagaggattcctcacctcattaaacctactcaccaccgcagatgaaaaatatattaatcctcatgtcttgaccaaagaaggaaaccaagggaaactctaagtccctccgatccacatcaagctaaaaaacccaggggaagtagtaagaaggaagcaataccctattcccctagaaggtaggatagtgttgaaacctataattgaaggccttatttaggatgggcttcttgagccctgtatgtctccttataacatcccaatcaagaatcaagaaatcaagactgctaccagccagtcaagaaattagatgggtcataccagctagtacaggaccttagagctatcaaccaaatagtccagagtacccaccctgttgtcaccaatccttacaccattcttagcaagattccatataatcatcaatggtttactataataaatttgaaggatgctttttgggcatgtcccctggctgaagatagctgagatatatttgcttttgagtgggaggatccatactcagggtggaaacaacaatatcgatggaccgtcttgccccaagggttcacagactcccctaaactttttggccaaattttagaagaagtactagaaaaagttgtcatcccagaacaaatatgccttcttcagtacctggatgacattcttatatctggtgaagatctagagaaggtaactgacttctctacacatattcttaaccatctgcagtttgaggggctatgagtctcaaaaagaaagcttcagtatgtagagcctgaagttaaatatttaggccacttaataagtgtaggcaagcgaataatagggcctgaatgaattgagggaatcgtgtccctacccttgcctcaaactaaacaagaactcaggaaatttttagggtcagtcagacactgtcgctaatggattgactcatatacactgccccgtaaactgttctatcaaaaacttgcccaggagaagcctaaccgtctcctgtggacttctgaggaagttgatcaaatcgagaggttggaggaaaggctcataactgcccctgttttaggcttaccctccctagaaaagccattccacctttttgctaatgtggacagtagggtaccttcgggagtgctgactcaagaacacagaggccgccagcagcccgtagccttcccatcaaaggtcttagacccagtcacttgtggatggcctcaacgcatccagtccatcgctgctatggcaatactaggtgaggaaagcagaaaattaaccttcggaggaaaattgacattaaacacgcctcaccaagttagaactatcttaaaccagagagcagtgagatggcttactgacttgagaatcttaaagtgtgaggccattctgttagaaaaggatgatttaacattgaccactgataattcactcaacccagcaggtttcctaacagggaatccacatctaaggagggaacacacatgtttagatttaattgattaccatacaaaggtttgaccagacctgggagaaacccccttctggactggacggcacttactcatagatggttcctcccaggtgattgagggaaaaagacacaatgggtattcagtgattgttggagaaactcttgtagaaataaagtcaggaaaattgcccaacagttgatctgctcaaacgtgtgagctgtttgcactcagccaagccttaaagtacttacagaaccacatctatacagattccaggtatgcctttggagtggcccatacatttgggaaaatttggactgaacgaggtctcattaatagtaaaggtcaagaccttgttcacaaggagctgttcacccaagcattgaataatcttcagttgccggaagaaatagctattgtccatgttcccggacaccagaaaagcctttcttttgaaagttgaggaaataacctagcagatcaggtagccaagcaggctgctgtgtcttctgaaatgcgtgtttttcacttaactccctacctccctcctcctaccataatccccattttctcttccaccgaaaaagagaaactaataaaaataggtgctaaagagaattcagaaggaaagtagatactgccagaccagagagaaatgttgtctaaaccctttatgagggaagtcgtatcccaactacatcaggggacccattttgggccccaggccatgtgtgacgcagttctcagagtttatggttgtataggaatttataccctggcaaaacaggttacagatagttgcttagtatgtaagaaaactaatagacatactataaaatgattacctctcaggggaaggaatccaggctaaaggccattccaaagtatctaagttgattacacagaaatgcctctgatagatcatctaaaatatttactagtgatagtaggccacctcactccctgggtcgaagctatccccttttcaaatgcaacagccagtaatgtagttgaggccctaattgaaaatatagtacccaggtttcgactaacggaaaatactgactcagacaatggaactcatttcaccacacacattattaaaaagctattccaaaatattagacattagatgggaacaccatactccctggcacccaccctcatcagggagagtagaaagaatgaattagactctaaagaaccacttaaccaaattagtcttacagacttggttgccatggaccaagtatcttcctatcaccctgctgagaatttgaactgcaccatggaaagacattggtctttctccttatgagatgctctatggattaccttatttgcactccactgttgatattcctacctttgaaacaaatgatcaattccttaaaaattatatacttggtctatgttctactttctcctctcttaaaactaaaggtctattagcacaggcaccacccttggagttcctggtgcatcaacattagcctggggatcacgtcctcatcaagagctggaaagaggagaagcttgagccagcctgggaaggtccttacttggtgctcctaactactgaaaccgcagtccgcacagcagagagaggatggactcaccacacccaagtcaagaaagcaccgccccctccagagtcgtgggccatagtcccaggggaaaaccctactaaactaaagctaagaagaatttaactccctttcatctattctattactcttttttctttcctcactctattgctgaccatatagttattaacataaccaagtcaatttcacctcaactattgcatttgatgcttgccttgttatatcctgtggggatttgtcaagccaaagaaagctctctacttcagatacctctgtccctcctggctctcctcagactaggcattagtgaatcgggaccatttaatctggggagatttctataaagatcccagtggcaaccaggagtcttcccccagtgatgtagagcttttaagccatagttggtccaaagttctgtggaccattaaagagcaaggatggattgccccaaccagtttttgtaatttcctaaattcatacattcgttttactaaagggacagtgcccactaactctcagctaaaccagtgcaaccctatacaggttattattttgagcccacaaaattcttcctcttttctaagctggttcccttctttaagccagttttatggtatgggggctgaagtttcagggacagaccctattggattctttgaaatgcacttctttgatcccctgctgtctgcacctgcctctgagcctttttccaaaacctctcacaacggaaccattgttcctcctctatctaacgacaaggccaagatagcgatggtagaagttaaagacttaaaacaaactggcaattgagacaggataccaagatgtaaatgtttggttggaatggatcaaatatttcatccacacgttaaacaaaagcaattgttatgcttgtgcgcacagcaggccagaggcccagattgtcccctttccactagggtggtcctccagttgaccgggcatgggctgcatggtagctcttttccaggattctatagcctggggtaagaagttgtgccaagctctctctctgctatatcccgaagtttgacaccttgtgggtcagcccccaagggccatccagcttccatctcccaacactaagtttacttcgtgtctctcatgacagggaggaaacttagtgttccttggagacctgaagggatgcagtgagcttaagaacttttggccaggcgcggtggctcatgcctgtaatcccagcactttgggaggccgaggcaggcggatcacaaggtcaggaaatcgagaccatcctggctaacacgatgaaaccccatctctactaaaaatacaaaaaaaaaaaaaaaaattagccaggcgtggcgtcatgcgcctgtagtctcagctacttgggaggctgaggcaggaggatggcgtgaacccaggaggtggagcttgcagtgagccgagatcgtgccactgcactccagcctgggcgacagagcgagactctctctcgaaaaaaaagaaaaagaactttcaaaagcttaccaatcagccagcccttgttcatcccctagcagaagtgtggtggtattgtggtggacctttactggacactctgccgaataactggattggcacttgtgctttagtccaactagctatccctttcaccctggcatttcatcaaccagaggaaggaaaaataagacatcgtaaagtgagagaagccccttatgggtctttagactctcacttctgtttagacgcaattggggtcccatggagaatacaagatcaatttaaagtctggaatcaaatagctgcaggatttgagtcaatatcttggtgggtgacaattaataaacatgtagattggataaactacatctattacaaccaacagtgatttagtaactacactagagatactgttagaggaatagctgagcaagtaggggctacaggccagatggcttgggaaaataggacagccttagacatgatattagcagaaagaggaggggtttgcatcgtgactaaaactcaatgttacaccttcatcccaaacaacattgcccctaatggaagtataacaaaggcattgcaaggtctcactgctctatccagtgagttagccagcagctcaggggtaaatgatccctttacaggatggctagaaaaatggttcggtaaatggaaaggaataatagcctcaattcttacctccctcgtagctgtaataggtgtacttattcttgtcgggtgctgtgtcataccatgcatccgtgggttggtgcagaggctcgtagaaacggcacttgctaaaacctcccttaactatcctccaccttatccagagaagcttcttcttttggaaaatcaagcagaacaactaagtcaagacatgttaaataagtttgaagagaaagccgtaagaaaaatgcaagaggaggaagttgttaaatatgaattctaaatttctcttcaaagaattagtatgtctgtatgttcaattctttgccttctacttttaaacttaatttcctcataaagcaacctttttcgattacctgctccaccctgactcactccgattacctgctccaccctgactcactccgattacctgctccaccctgactcactccgattacctgctccaccctgactcattccgattacctgctccaccctgactcattattctctgccctgcataaccattattttcccgccaaagcactcaccccatcactctctttaaattagccaatcggaattagtttagcctgtgtggtctaaccctagccaataggggaatgacatagcagcaggggccacatccttcagggataagaacccctttccttcccttgtccagatgtgtgctcaccattgctccatctgtgaggttgcacccttttatagaagtaccttgccttgctgagaattgaacagaaaattttatattcgagtgctatttattttgaggcacagaaactttatatataacaatataaacccgagaccttggcgggcacacacacaagcagctgaatgtcaagaggagtggaggaacggagtggcagagaatggcagagagcgctggagagtggcagagcagcatggcagagagggagggaagaggcgtctgaactttggaagacacctccactcctcaataaagtctccgcatgtatcacttttcaaacagttcatgtgacctgattaatccaggatgccagacaagaatctggggaagttaacattcaggcatccctggatggcaaggctaaaggagcacactgtaacatatgcccacttgggctccagcacctgtccatctgtgtgttcccccttccctcaggggtttgagcagtggggtgaccaaacagacgagccacaccccctgttgcatgtcctgcaaggagaatcagggaactctcctgtttcagttggaagagcaagtgtccctctctctctcgtggtggggagacatctcttccttctgggctgtcacagccccaacctcaccaacctacctgacaagggagtctggcagaacaagggcaagggcagggagaagcacctctaactctattcctggataataatcaagtctctaaaagtcatcctggagccgggcacagtggctcatgcctgtaatcccagcactttgggaggctgaggcgggtggatcacctgatgtcaggagttcgagaccagcctggccaacatggtgaaaacctaactctactaaaatacaaaaaaaattagctaggcatggtggcaggtgcctgtaatcccacctacttgggtggctgaggcaggagaatcacttgaacctgggaggcggaggtcgcaatgagctgagactgtgccactatgctccagcctgggtgacagagagagactctgcctcaaataaataaataaataaataaataaataaataaataaataaataaataaagtcatcctctagggctttgaggccgttcaagcccctattttttccatctctgtggatgagcctctgttaaatctgattgtggctgaacaagagataatgttcctaatagatacagggaccagttattcagctttaagtgtttattacagcccaatgtgctagtcctccatttcattacgggtattgataaacttcagtgaggctgtttcacactgccactcccttataaaatgaaaggctattcctttacccactcttcagtcctgccaagctgccctgtttctttattaggtcacaatttgctcacaaaattacaagcgaatttacagttaagacctcacattctagctgtaattaactcacacttcaccaaaaaagttgctgcagtctatagaacatcacattttaaaacaagtgccggccaggcgcagtggctcacgcctgtaatcccagcactttgggaggccaaggcgggtggatcacttgaggtcaggagtttgagaccagcctggtcaatatggcgaaaccccatccctactaaaaatacaaaaattagctgggcatggtggcacacacctgtaatcccagctactcaggaggctgaggcaggggaatcacttgaacctcggaggtggagattgcagtgagccaagatagtgccattgcactccagccctggcaacaagagtgaaacgctgtctcaaaaaaaaaaaaattgttcttttgtttgcttttctttcaccctgattcctccttccccctttgccgtcttcagtaccaagctacaaagctaggggtggctgaggacagtaaacagagtgtggtcttagctggctttttccctcctgggaagttgttgtttaggatcctaattctagttcagaggtgcattctaaatagtcttctccattgcctttccccccaaaattaatctcacacgttggcttgtgtgtgcattcacgtgaggaactgaactgtcattttcatagataaataagagactgagtttccttagctccaaagagaaagggcattttgctcctcccagcagaaaggtacccgagtgactggggggccttgcgggagtgttggggggttgagcccccagcgacatgaagtgattctgcagggaactcacaacaaaattagttttaaaaaggctcgtccaggaagcacatataggaactggtcactctgagttttgagccctcttggaggtgctagacctccggagaaaacactgagacacctaagagggtggtggcaaggattcagtggtgacacactgtggagtctcatctgcaaccattacacttcgacctactccacaaaaaccctaggccacagctcagttactccttaaaagaaagtgggaaacaaataatctaagaataaggaaaaacaaggtgttgacgaaaagagttaaactgtgtaaaatagttgaagatatttattcagagcccaatatgagtgactatggcccgtgacatagcccttaggaggtcctgagaacacgtgcctaaggtggtcggggctcagcttggttttgtatattttaggaaggcatgagacatcaatcaaatacatttaagaaacacattggtttgattcagaaaggcgggacaattcaaagcaggggtcagggtgagggtggcttccaggctataggctataggtaaatcggtaaatttaaactttttgttttgttttgtttttttgttttgagacagagactcactcttccacccaggctggagtgaagtggcacaatctcaactcactgcaacctccgcccccatgggtttcaagtaattctcctgcctcagcctcctgagtagctgggattacaggcacccaccaccacgcctggctaatttttgtatttttagtagaggcagggtttccccatgttggccagagtgatcttgaactcctgacttcaggtgatccaccggcctcggcctcccaaagtgctaggattatgggtgtgagccaccttgcctggtctaaatttaaacattttctgattgacaattggttgagtttgtctaaagacccgggatcaatagaaagtaaatgtttaggttaagataaaagactgtggagtccaaggttcttttgaggtcttatattggctgcccttagagacaataggtgacaaatgtttcttattcagacctttgaaaatgtgctagactattagttaatctcttcaggattgggagggcctaaaataaaaagatctagctatgctaatagagattctttacagttgcaaattttcccccacaaagtacagtttggcaggaccatttcaaaatatggcaaagaaacatgttttggggtaaaacaattgactttcttcttggtcatgtaatgttatgccagagtcagattggaaagtagtcatcatatataatgttaaataaaatccatctgatgagaatttatgatttgtagggcatgactccccagaccccttagataggaatttaggcaagatagaaaaaatcagagcttagtcttctcacaagagaatgaccctcttttaggtaccccattgattttacggcatctctactttgcaagtgtttgtgtaaatggacatattatggtctctttgtgcacaattatgtcaaagacaatttagagcttgaaggttgacctccagctgtaaagttcctaagttctctatctctctgctttcttttctgcctgttttaagtctgctattatttttctttctttttttgagacagagtcttgctctgtgcccaggttggagtgcagtggtgcaatctcagctcactacaacctctgcctcccaggttcaagcagtcctcccacctcagcctcctgaatagctgggactacaggcatgtgccaccactcttggctaatttttttttttttttgagacagagtcttgctctgttgcccaggctggagtgcaatggcatgatctcagcaaaccaacgagtttctattaatatctcatggctagagttctgagataatagctataggatctttggttgtatgagtatgtatgtgtgtgtttatgcatacatacacttatttcattgtgttttctagccacaggtactgaattggcttaaagttaaagaatattcataaattaataagcctaaatgcttttcaagttcatgtgacttaagtaaaatctttaataagctagctttaaaattattggtaaagtaatattagaaatgtcttaaaaattgttagcataaatttttgtttgcatttattgatcaagggacttcatatactgccaaatactgtaaggtgtcaaaatttggcatagggtttgtaaaactacaaaaccgttcaaaacagaatgatttttgcttttgtaatttttgataaataagacattgatattggtttaatgaaaacagctaaatcatgaattatttagtgaaataacaatatatttaatcttaaggtttttacttagcaaacacctgaaattcacaggctatcaaatgtttgacagggaaataactttaaatgatgactatcacagttttcataactaacctgggtaaactattaaaataaaatatttaggtaaatgtaatgggataaatacttgtagacaaagttgtcataatttaggatctaaagttatgttaaattaaacaatagatatttcattaactgggtttttttaattaaaaaagatattgcaggaaatcattttttttctaaaaaatgtgttcttgttaaaaggaggataatttttgtctaattcaaagcttatttaaaggttatatataaaataaggtaaaaagaaacaagaaaatatataaagaagttatagaaataaaaaagaatttttggtaagaaagcttaaagaaaaataattttacatgagaaagaaccttgtatggtacatttttgtcctagaataaaatgactggttgtttaagaaagaggaatgttcatacaaaccagaaagtccaagcatgtcgtgaatggtctgtttaagttataataagagcatttatggaaaaagacccacaaactttcatataatcaagttgtctataattaaagggaaattatttataatgatcttttgagagattgggttttgatattaaaaaacatttatacactaaagaattcattagaacaacattttcttaaggtattgatttacttttaataaattacaagactatatatataatatattttttcctgcaaagttcaacttttattgcatctcactgttttcagctttctctccccttttaaagtacctgaaataataactctatctttcaactcatttttagctcctgtaagtttttttattttctcctttgtgttctaactgttgtggcctgacgctaataaatgttttatctttgtggtctaaaggaaacattccttccaacataatatttcctgtagggaacagcggttgaaatgcagaaggtgttttgttttccctttgggaaattggcctaataaacagagtttatgctttattgaaataattcctatgtcattattactaagttttggtttgtttagaaaaaaacccgagattaaattttttttaattaagattattacatacatgtaaccctctgtatgtgcttttaaagtccttgtgccattaagttacagagctttgagtccttggtctaaaaagaacaccaagtcctgctaaatattaaacactgacagcagttaaaacctcattttctgacctggtagaagatgccaatcaaaataaactgtgttcatgagacagaaggccggaaattaaaacgattcaactcctcaaggtctggagactatcaaagaagaggtgggtgcatgagattgtaagggccgattttgagagatcaaatgattataaggccaattttgagagataaaataattgagtttctctataaattaaccattaatctcaaaggcacactgatgcaagactagcatatgggctgctgtgtcacgttaacaaggttttcttggagaattaacccactccttaataaaaggttataaaagaggttataaaggttataaaaaaggcttgtggaatttttatcttgtggtcaggatgattaaaattttatagattgtttatacattttgaaaaacaaatttaattggcctcgtttttattagggcttattgtttaggcaattaagtcttctctctcaaagaatcaaggtttttgccttttttttgaaatctttgagttatcaagttgagtaaatgaaagacttattttacaatgacttgatctgtgatcctattttgtgatatcaagcattttatttatttatttatttatttttgagatggagtcttactctgttgcccaggctggagtgcagtgctatgatcttggctcactgcaacctccacctcctgggttcaagcgattctcctgcctcagcctcccgagtagctgagattacaggtgcctgccaccacacccggctaatttttgtatttttcatagagacagcatttaccatgttggccaggctggtctagaactcctgacctcaggcgatccacccaccttggcctcccaaagttttgggattacaggtatgaaccactgtgcccagccaaatcaagcattttaaactttttatttttatttttaaaattttaatattttgagatggagtctctctctgtcactcaggctggagtgcagtggtgcaatcttggctcactgcaacctctgcctcccaggttcaagcaattctcatgcctcagcctcatgaatagctgggattacaggcacttgccaccacacccagctaatttttctatttttagtagtgacagggtttcaccatgttggccaggctggtcttgaactcctaacctcaggtgatccacttgccttggcctcccaaagtgctgagattacaggtgtgaaaggtgtttaaaggccactgtgcctggcctttaaactttttatatttgacaaactttccaaagtcaaattctaacttggttcctcaatgattttttgatattagtcccctgaagtccaaaagagacacagtcagcttatttggcataaaaatcatacaggaagcattgtcaaatatgtaatagtgtttggctttctttgggctgtatttgtataaatatgttattggcatatgttccaaaattatgggaaaatcctataattatgaatgacttagtatatgttattaatcattatcattattatgtaaaattattgtatgctacagaagtaaccaagtttctttgtcaattgtgtctttaagtatgacttttctaaaacttttgtcatccacagttgttttacttttatccttttcaaaaggatgattttacaatcagcataggactctgacagttgctgttgaatacaggttttggagatagtgacactaaaatagagaaaaaaaatccaacactcccatagagagctgaaatatacatgaatagcaagcagaagaggagttaactgcatggactgaactaatagaagactgaaataatccttctatgactttttgcttaaaacattgctaatcctttctttgtttttcagagccaagaaaacatttattttgagcttttaaaaaatttattattattattattattaacaaataaataatcttctttctttttttcttttatctttctctgcagggcaagttctgtatttatagcttttaacaattgaggaaattatactcctataaacaaaatttggagcatatttctctctatctggtttctctaaaatttggaaactagttgggagtattcttaacttatagcaatatagttatctgcacaagtacaataagaatctgttttcttttgtaagaggacataattggggacagtggtgattttaccaaggttttgactggaacaacatgctatcagatgcagactcctttaaggaatcaaagttgacttacagagctaataaaagcatcttgggaaagctggcctcctatcttgtctacacagtccctgtacaggttcctgacctgtggtaagtaaagagtgtcactttctaacaggcccaggagcccaaagtcttcctgaggtgaggaattcatccaattaatacaggtatttgcaggcacaggccgggcttaagacattaaagtcgaatgtgagattacttatggaataaagttccagcaaagccaattaaaaaaaaaacaaggagcctatatggcaaataattattcttgatgattttatgcaaatactccagccaaatataataagacagaaacttattttgcaaatgaattttgttctataatttgtcctcagtgaaaggggactggagagagaaaaaattatgtttcaaaatcacctatagtacacctgttgttagattttagtctcacttagtgtttttaaatttttattattttctatagtttggactaaactctaaaatttttcctggtcacaagtccccaaaataatttttttcattttttttcttttttcctttccttttccccccacattttttcctgattagaaatcaccaaacattaaactgtgctttcctaaagccctgtgaactaaagctagacaatctatttacatacataagctactttcatacctgcctactggtgtatgaacttcagagtaatatggcctatattgatttcccaggattattgttgttgttgttgtttttctcctttcctcccccattttctcttaggacgtgagacttcacaacctgctaaagcgagctttcctaataatgtggaacctacctgtctatgaataaactgtcctagtcatgagagatcagacaaaacctgagaccagaggctaattttcttctaaaatgcttttaaaaagaaaaggggggaaatgtgaaaggaaaataaacttgggaccctcaaatcactaagccaaaacgaaaagtcaagctgggaacggcatcgggcaaacctgcctcccattctaatgggatagctaaataagatagctacaaagattttaaaaagctacatacctccctcacaattttcccacaaggaaattccttgtgtacctagaacagacagaactcaaagtcatccctctgctcatgggagacaaatgcacatctgatggcttcctttgccctattgcttcgctaagccagactaaggcataagtgactattcctgcaagttgcatattcagtggagggctaatcagaaactcaaaagaatgtaacaatttgtcctttatctacctatgacctggaaaacccctccccacttcaggttgtctcacctttctggatggaattgatgtacatcttacgtatttgctgactgatgtctcatgtctccctaaaatgtataaaacctagctgtgccccaactaccttgggcacatgttatcaggacctcctatggctgtgtcactggtgtgtccttgaccttggtagaataaattttctaaattgattgagacttgtctcagataactcttgatttgcagtaagtagcatttctaaacatctctggaatgcatgcatattgaaactcattatgcaacccttgctgacatcaaggcaggaaaatgtctacaaatgtaatcatttagcgtgacctatgtggctaatgtggaccaaattatccttaagctcctgctttaaggtgcataaatgcccctgaggaaaaatccaccttggcactctccatcctatcttgctgagattcttgcctgcactcttctacagagttctttctttctaataaaactttccttttttcaaaccaatactattatccataaattcttcttctttttttgtttttttgaaacggaatctcactttgttgcccaggctggagtgcagtagcatgatcttggctcactgcaacctccacctcctgggctcaagtgagtctcctgcctcagcctccagagtagctgggattacagacgtccaccaccacgtccagctaatttttgtatttttagtagagatgaggtttcaccatgttggccaggctggttttgaactcctgacctcaaatgatccacctgccttggcctcccaaagtgctgggattataggtatgagccaccatgcccagcagtaaattctccttactaatccacgagtggaccactttccaatgctgaggctctgacacctcgctgggcagccacttttgattattttgggttgtcagggctcagggacacaagaacttgctccttaggggagctggaggtctagtagggattgcttgttctccatcaggcccctagtagggaggcctctcctgtccccaatccctgactcccagggatgctcccctccaaaccacagcaggaagttcctccttaggtcagacccacagccctgatgctgtggtctcactgcaggtcatagtctcacaggggcctcttatattattttaattttaattttaattaaattaaattaattttttttttttagatggagtctcgctcttatcgcccaggctggagtgcggtggtgtgatcttggctcactgcaacttctgcctcccaggttcaagtgattctcctgcctcagccacctgagtagctgggattacaggcatccgccaccatgcctggctaatttttgtatttttagtagagacagggttttgccatgttgaccaggctggtctcgaaatcctggcctcaagtgttctgcctgcctcagcctcccaaagtgctgggattacaggtgtgagccaccgtgcctggtcttatattattttaattttaaatttaagaatacattcttaatatcaaccttcaaagactccctgttgcttaccaagttaagaaaactacttaaacctcacatataattcctttctcaactgggaccaataaaccgtgacagctttattgaagggggccagccccttcacacctgtgggtatttctcgtcaggtgggatgagagactgagaaaagaaatagacacagggacaaagtacagagaaagaacagtgggcccagggcactggcgctcagcatacgaaggacccgcaccggcgccagcctctgagttccctcagtatttattgatcatgatctttactatcttagcaaggggagtgtagcagggcaacaggtggggagaaggtcagcagggaaacatgtgagcaaaggaatctgtatcatgagtaagttcaaggaaagatactgtgcccggatgtgcacgaaggctagatttatgtttctctttacccaagtatctcagtgtagcaaagagcaacagagcagtattgctgccagcatatctcgcctccagccacagggcggttttctcctatctcagaatagaatgaatgggaatggtcggctttacacagagacattccattcccagggatgagcagagaagccttcctcttatctcaactgcaaagaggcctccctctttcactcctcctcctcagcacagaccctttatgggtgtcgggctgggggatggtaaggtctttcctttcccatgaggccatatctcaggctgtctcagttgggggaaacgttggacaatacccaggctttcttgggcagaggtccctgtggctttccacagtgcattgtgtccttggttaacagagaatggagaatggcgatgacttttaccaagcatactgcctgcaaacatattaacaaggcacatcctgcacagtcctaaatccattaaactttgatccaatacagcacatgtttctgtgagcacagggttggggataaagttacaagttaacagcatctcaaagcagaaacaatttttcttaatacagatcaaaatggagtttcttatgtttccttttctacatagacacagtaacaatctgatttctctttcttttccccacactttctcacgtgttctttctttctttctttcttttcttttttgagatggagtctcgctttgttgcccaggctggagtgcagtggcgtaatctcagctcactgcaaactctgcctcccaggttcaagtgattctcgtgcctcagcctcccgagcagctgggattacaggcatgcaccatgacgcccagctaatttttgtattttcagtagagacgggtttcaccatcttggccaggctggtctcgaactcctgacctcaagtgatccacctacctcagcctcccaaattactgggatcatatgaatgagccaccatgcctggcccatgtttttcttgtactttaggctttgctacttacaaccagaactgcttaccattctgtcagaagccttccaaccagggcaactccatcttgaataggggctgggtaaaataaggctgagacccactgaactgctttcccagaaggtcagacattcttagtcacaggatgggataggagtttggcaggactggtatcacaagtacaggtcacaaagaccctgctgataaaacaggatgcagtaaaagaagccggccaaaatccaccaaaactacgatggggatgaaagtgacctcgattcgtcctcactgctcattatataggaattataatgcattcgcatgctaaaagacactcccaccagcaccatgagaatttaccaatgccatggcaacgtcaggaagttaccctacatggtctaaaaaggggacgaaccctcagttctgggaattgcccatccctttcctggtaaaacaatgaataatccaccccttgtttagcatacgatcaaggagtaactataagtatgttcagctgagcagcccatgccactgccctgcctatggagtagccattattttattcctttactttcttaaataaacttgctttcactttactctatggattcaccccaaattccttcttgtgtgaggtccagaaaccctgtcttggggtctggtttggtacccctttctggtaataattctgtaagtatttgtagtacgtctgagccaccaaaatttccatactgatccttccattagaatatcctttctgcctgtctctttctggcaggatctgatccatatttcaaagccagtctcaaatgccaccttttccaaagaaacctatccttatatctttatctaatacaaacagtatatattgggagcctaagaaatgcttgttgcatacatcaatgaatgaaccccaaaccaatgtatttctcccttccttgtaatctccagaaatgtttataaactttgttgttgtttatttgtttgttttatttttatttttattttgagatggagttttgttcttgtcacccaggcgggagtgtaatggcgcgatctcggctcaccacaacctctgcctcctgggttcaagtgattctcctgtctcagcctcccgagtagctgggattacaggtgtgcactaccatgcccagctaatttttgtggttttagtagaaatggggtttcaccatgttggtcaggctggtctcaaactcctgacctcaggtgatccacccgccttggcctcccaaagtgctgggattacaggcgtgagccaccgtgcccggcctgttgctatttatttaatatactttatttttttgagcgattataagtttatttttatttatttatttatttatttatttatttttgagacagggtctcattgtcacctcttgcccaggctggagtgcagtggcacgatgttagctcactgcaacctctgcctcccagagtcaagtgatcctgccacctcagcctcctgagtagttgggaccacagatgtgcaccaccacgctgggctactatttttatatttttagtgcagatggggttttgccatgttgctcaggctgatcctgaactcctgagctcaagcaatctgcctgccttggcctcccaaagttctggaattacatgcgtgagctactgagcccggccttaggtttacagaacagcattccacccatgttatttatgcaggggagcacaccacacacatcactttgcagcttcctttctcctcttatatgtcttacagatctttctgtgttctgtacattgagacactcattcattggcttcactcattcatttgaattcattcctttgttcaacagatatttatcgtcagctctatgtcaggcactatgagaagtgcttgggatataaaactgaacaaaataaacaaagtcctttccattggagagatgacattctagtgtaaggagatagacaatagataataaatacaacaaataaataaatacatggtttagtatgttataagatgctttctgtaggaaaaaagtgagagggacctggagtggagggaggaccgagtggggacaggtgcagggtgggggcagccagtagagcccctctgaggaggagtggatcacaggaggatgactggcaagacctaaaggtggcaagctgtctctggtgctggctctgagagcaggatagctggagtagagtgagggaaaggcgaggtcagaggtgaacctgcagggcaggtggggctccttccgctagcgcatggtgttccattatccagatgcaccaggacaaatgtcgcccactgccattactaggtgcttaccatgtgccatcaagaacaataccgcaggccgggtgcggtggctcacgcctgtaatcccagcattttgggaggccaagatgggtggatcacttgaggtcaggagttcgagaccagcctggctaacatggtgaaacctggtctcgactagaaatctaaaattagcctagcgtggaggcgcactcctgtaaacccagctacttgggaggctgaggcaggagaatctattgaacccaggaggcagaggttgcagtgagcctagatttcgccattgcactccaactgggcaagagcaaaaatctgtctcaaaaaacaaacaaaaacaatactgcaataaacattctgtcagtctgtcattttgcccatggacagaatatctgcagaattaattcccggcagtgaacttgagagagatcacccaattgccttccaaaggagctgtgcctggaccatgggtttcagcacaaagtgctgctccctccaacttgtagactcttctggcaggtcacggtggagctcacattctagcgggagagtgtccagggcagagatattccattccgtgtcttttctcccagggctcgcacagagagggttcacgcggtagtcagtaggtgggcagtgcttggtgaaggcattgatgggtggagggattgaaggatgaatgaatggattaggggctgacagtgccgctgcagttactcaaaggagccaccaggaggcgcagggagcccacattctggagacaaaccttttaaaaaaagcatctggtgacttaacgaccttttcaccaatggcttgtgtggggccttaatgctagggtgagaaaaaggtgggagatggaagaaaggggagtgggtaaaaggacatgtgggagaagaaggcagagagagggccttctgagggggcctccacgccaggtaaggaccgtttagctcccctaagagcctgcagcattgatgcagatcccagcaaagccaaaacccccttatgcccacagttgagcccaaaagcccagaacagaggggaaaaataaatttcaggataggccaggtgaagtggcttacgcctgtaatcccaaaacttggcgaggtcaagtaatcccaagtactttgggaggctgacaggggaaactctatctaaaaaaaaaaaataagaaaaggaatttccaggataaatatgtacagtataatcccatttatgtgaaaaaaaaaatctccacaaataaattcctttgtgcgtgtgtgtgtgtgtgtgtgtgtgtgtgtttgtgtgtgacggagtctcagtctgtcgcccaggctgaagtgcagtggcacgttctcggctcactgcaacctccggctcccaggttcaagcaattctcctgcctcagcctcctgagtatctgggattacaggcgtgtgacaccacacccagctaatttttgtatttgtggtagagacggggtttcaccatgttggtcaggctggtctcgaactcctgacctcgtgatctgcccgcctcagcctcccataaattctacatattagtttggggagtgtgtatttaccacatacacatctacagggaaaatctggaaaggtaaatgtcgaattgacaacagtggttacttttgttattgtgtgtgtagagaggggcaggggacaaaaaggaaaatgaggagtgatcaaaggggactttaattttcttttttttttttgagacagagtctcagctcactgcaacctctgtctcccaggttcaagtgattctcctgcctcagcctcccaggtagctgggattacaggcacccgccaccacgcctagctaatttttgtattttattttagtagagacagggtttcggtttcaccatgttggccaggctggtctcaaactcctgacctcaggtgatctgcctgctgcggcctcccaaagtgctgggattacaggcgtgagtcactgcaccgggcccccaaaggggactttagactaaactgaaacattttaactttccaggaatctgtaaccctgctattatataaccacaaattaaaaattactttaaaaaatgaaaaaaaaaaaaaaaaaaaaaaggctgggagcggtggctcacacctgtaatcccagcactttgggaggctgaggcaggaggatcacgaggtcaggggtttgagaccagcctggccaaaacggtgaaaccctgcctctactaaaaagacaaaaattagcagagtgtggtggcacgtgcctgcagttccaactactcaggaggctgaggcaggagaatcgcttgaacttgggaggcagaggttgcagtgagcctagactgcgccattgcactccagcctgggcaacagagcaagactccggctcaaagaaaaaaaaaaaaggaaaagagaaaaaaaaaggaacaataacaacaacaaaaattaaatgctatcttgtgttgcatcaatagaagtcttacgtgcagctcaagggaggtgacagccccctctgctctgctcagaccacacctgggacctcctttcctcttcttggccctgtcccgtgagaagaataatgacagcctaaggcatgctgggggttggagatggggggaggctggggccatctgcacatgatacagatccaggaatagtccctttacccaagcgggagaaactgggcaggtgagcagcttccaggtgtgtggatggcaaatggatgccagactttaggataggaatccaggggtgcagcggatggaaagtccagcccaggatggggcatagttttcccacccagctagggagggagggtaggggctactctggggtgtcaggagtgccgaagcctgaggtaggcgcaagccaggcagcatggcagcatccttccagagggtgttgtgcagctgtggaaaacaattgctgggaggccggcaggggcagtggtggaggagaccagagcttaattctaggtgagtcacaatagcctcatctgtagaatgagtgaggggtggggcgtagtttcagattttttttttttttttgacacgtagtttcgctcctgttgcccaggctggagcgcaatggcgcaatctcggctcaccgcaacctccgcctcccgggttcaagcgactctcctgcctcagcctcctgagtagctgggattacagccatgtgccaccatgcccggctaattttgtatttttagtagagacggggtttctccatgttggtcaggctggtcttgaactcttgatccgcccgccttggcctcccaaagtgctgggattacaggcgtcagccaccgtgccccaccagtttctgactgattttcttttttttttttttttgagacggagtcccgctctgtcgcccgggcgaagtgcagtggcgcgatctcggctccctgcaagctccgcctcccgggttcacgccattcccgggcctgggaccacaggcgccgccaccacgcccggctagtatctttttttatttttattttcaatagagacggggtttcaccgtgttagccaggacggtctcgatctcccgacctcgtgatccgcccgcctcggcctcccaaagtgccgggatcacaggcgtgagccaccgcgccgggcccagcttctgattttatgcagctggcgggatcttgttcttggtcctttaaggcgaccggagggattgcagttttaaaaactcgccagcagaggtcgccttctgacggatttgaccaaaaaatccattccggtgggaaaggggaacctgcgcctgcgattctctctctctccccctctctccctctctctttctctccccccctctctctctctccctccctccctctctcctcctactcctccctccctccctctctctgtctctccctccctccctcccgctctctcccccctccccctctccccctccctccctcccttcctccctctctgtctctttctttgagacaaagtttcactctgtcacccaggctggagtgcagtggcacgatctccactcactgcaacctctgcctcccggggttcgtgattctcatgcctcagcctcccgagtagctgggattacaggcgcccgccaccacgcccggctaatttttgtatttttagtagagacggggttttgccatgttggccaggctggtctcaaactcctgacctcaagtgatctgcctgcctcggcctcccaaactaagattcatttgttgactaagtgaataaaaggggagacattgaagagggggacccgactggatttgggggtgaaggtggagttgagagtgactttgaggcttctgcttgagcaatgagtggagggtgcctctcctgagctggggaaactggggcagcactgacggaggggacacagctacagaggggagaaccctctcctgccggggctgcgggttacagcctgcactgcgattctctgatctcagggacctcagacttctggggccctgtcccctacctctgtgtatgaccctagctggctgagggctgaaggcttgctgttggctctttctgcaccctcagccttctccttcctcttccctctgcaggactctgtcctgggtccttaggaagagtccaggccccaggacagggaagttgggtcaggcctggacctcacattccctgcctgtcccatgaggtggacagtgagaggacaaatgcctggacccctggccccaaacccaagagcagatgtaccggagaagagcttcttagagcaccaggtgccagggctgcggtggagaatcaggggggcccaggggaaggggctgcagatgagggaggagatagatacggagggcctgtgtgcctcccagatacagggctggctttcccagcccagaaggttctttctgcctttcccagtcttcttccattctcatttcatgttcacacttttggccatacccagggtcagccatgaagattgttctcagaatgttttctttcttccttcctttctctttcttttctttctttcttcctttctttctttcctttctttttctttcttctctttctttttttcttttcttctttctctctctttctttctctctctctctctccttccttccttccttcttttctttctttcttctttctttttttgaaacagagtctcactatgtcacccaggctgtagtgcattggcacgatcactgctcactgcagccttgacctcctgggctcaagtgatcctcccgcctcagcctcctgagtagctgggaccacaggtatgcaccaccatgcccagctgattttttaattttttgtagagatgggggtctcactgtgttgctctggttggtcttaaactgctgggctcaagtgatcctcccgccttggccttccagagtgttgggattacaagcaggagcagcacacctggccaatgttttatttaaatcaactcacttaggttgaattagaataattttagacacacagaagagtgtgtctatataattttgaattatatacccaacactcagatataacattagcattttgccatatttgcttcatctatttctttctgaaatattttaatgtaaattacagatatcatgaattttcatccccaaatactttagtctgcatcagtcaaagatatctaatatttaatccacaatggatttccccagtggcaattcccctaaattgtgttttacagttgacagtggatttattgtaaaaggaaactcgatataccaagtgacaagcaagttatcttctgttataaatagaaaggatccctggaaatggacacagtgtcaggcccagagctgtgggtggagacctgctctctgtttgacataaataggagatcagtggctactaaatctgaagacagggcagcagcaaagaacattttctcacggatgtgatgagacttgaaagggactcagaaagggggtcactttctccaggttggggtaactgttatttaagccagggttcatctgcagcgtggggagccagagggtgaccccttccctaggtgatggaggtggctgaggctccagaagtttccagagaaagatctggtgttcctacaaggccagtggcagggggaagggcactagacagtggggctggagggtgtgggcctgtccctgctctgattttgggcactgcacttttgcctgtaagaaggggatatgtgaggccaggacagggtctcctactctgtccccactcccacgccaaacagggccttgaggactctcgcgacctccatgacccagcttccctcctaccccagccccaagcctgtttttgttcccctccctccctcctgcttgatctttgagcctcagccaggatgttacctcctcctagaagcctgccttggtccctggaatggattaagggactctctcctgggccccacagctgcccaggatcactcagcactgtagtgccctgttggcctttgcctccctccagctgtggacgtacaaagcagacagcgaatctgtcttgctcaccactgtacccccatcccctactgcagcacctggcacatagcagtagtgcggcacacttgttgaatgaataagggatcattactactacgcttcccactcataaatgtctgcctcttcggggggctcagaatgcacatttggtccttcattaactcatttactcacaattttttttttttttttttttttgagacggagtttcactcttgtcgcccaggctggagtgcaatggtgtgatctcggctcactgcaacctctgcctctcaggttcaagcgattctcctgcctcagcctcccgagtagctgggattacaggcgctagccaccatgcctggctaatttttgtatttttagtagagatggggtttcaccatgttggccaggctggtctcgaactcctgacctctcaggtgattcacccacctcagcctcccaaagtgctgggattacaggcatgagccaccgtgcctggctcatttactcacaaatatttactgagcacctactatgtcccaagcagtattctaggcactggaaatggggcaaggctgctgcctctgtggaacttatactggggtgtgggaggcaaagaaaaacaagcaaacatacatatgaaataatttaagatgccactcgtggtgggagggactgacaggagctgctgtggaagagagcattaggagggccttgctgaggggtgactttatttcagctgagaggtggatgagaaggcacctgcaggggaagaagaaccaggggaagggtgttcctgatggagcaacagcctgtgctaaggccccaaagtgagcaccagctgggcgctgagggacagaaccaggcacaggctcggttagaggaggtctgaggtcccagaggagacaagagaggggaaggatgggagggcaggcctgagccgcagaaggccagtggaaggttctgagtgggaagaggatgggataggagttatattctgaaaggtccgcctgtgctgggtggaggatgggtggggacaggcaggagcagcccaggctctgatgcagcctccaggcagagatggaccaggggagcccatttcatatccggcccctgtggagggtctgagggtgttgagcagacaggccctggctttggaagtcctgggtgtctggacccgcctgcctgtggggccccagcagagaggaagggaggcggggctcccagtgcctgttgactcatttgcatctgatttgcatgtgaagcagagagtcaggttgaaagctgggaaggcctgtgccagccctgggtagagggtcttgggtgttagttcccacaaagactctgtcccaggccatgaccttcctgttcaggaggggctctgccttcccttgcctccaacgcccctctggcctggccctgccatctggggctgggcagtgcccacggggacaaggtcgtttccttttaggagaggtctgcatgctatgaggacaaaggccaaatccccaccctcgggaacctccttccccagcaaaatcccatctgtcaggctcagcctctgaccttcgacctctctgtcagcacaggctgcagtgttggggaggggagggtccccacccccaaccctaggggagacccaaacctctccccccagccttctccatctgtccccttcggcttctgccacctgctccgtgtgatccaggccaggtcacctccgctttctgggccttggttcccccacgtgtccaatgtgggtttcccaaataccagtgacttgtgtcagtccacttttgtaattgtagccaactccacttactatttcttaagtgaacttactctccttcacttaaatagatttaatttaaaaagaaatgttataccagctctgtaaatggaaaaccagtttcatctgccacaagtagaaacataataggaaaaaataatgaaatggaaataaaacaatgttactctagtctagcctcaagtgaaaaaagtcagacacaaaaggttacatttatatgattgtctagaaaatgcaaaactagagagaaagaaaacagaccactggttgccagggttggggagagggagctgacaatatcaaggggtgcagaaactttttagggtgatccaaactgttttttgatgatgatggtggttacagattgtatacatttgccaaaaatcaccaaagtgtacattcaaagttggtgagttttattttatgtataaaccacctcaaaaagacaaattttagagaagaaaacaaagaaaaatgccggtttagccccaagtctgaggcttcctctctgttaaacaaattagcaaatagaaggccaggcatggtggctcatgcctgtaatcccagcactttgggaggctgaggcaggaggatcacttgaggtcaggagttcaagaccagccatggccaacatggtgaaatcctgtctctacaaaaaatacaaaaattagctgggcgtggtggcgcatgcttgtaattccagctactcaggaggctgaggcaggagaattgcttgaacctgggaggcggttgcagtgagccgagattgcaccaccgcactccaccctgagtaacagagcaagagactccatctcaaaaaacaaacaaacaaacaaggaagagaaagagggatttctctctctgtctctcaccaactctctaaccctccctagttccatgcaccaaggaaaagctatgtgaggacataggagaaggtggccagccacaggccaagaagagagccttcaccagggactgaatcagctggcacctccatctggtacctctaggctccagagctgtgagaaatagatgtgtgctgtttgagccacatagtctctgatattttgttttggcagccggagcagactcatgccctctgatctcatcattagcataatgcctgtttatagaaccatgctgtgggcaggctctgtgctaaaagctttgccagcatcatttcagagacttgatgtgacatcttacatcgtaggggaaattattgttcccattaaagatgggcccacagtgtggctaagccagtggggcatgtcctcagacctggagtgctcccataggaagctgggcccgattctttctgaaggtgtgagctggaggcagtgatggtggtttgagaggcacgggctgtggggaactggatactgagggcagtccctgtgtcccaggggaagcactctgtgctttcaaggggggcactggcagagaaggaagtgtccctcatcacatcctggagacccaccctctggagacagtgttttcacgatttcttttctttcttttttttttcagacagggtctcactctgtcacccaggctagagtgcagtggcacgatctcagctcactgcaacctctgccttctaggttcaagtaattctcctacctcagcctcctgagtagctgggattacaggcacccgccaccacgcccagctcatttttatttttttatttttcgtagagacagggtttcaccacgttggccaggctggtgtcaaactcctgacctcaaatgatctgcttgctttggcctcccaaagtgctgggattacaggcatgagccatcatgcctggccatgttttcactatttctatggaccgtttcataagtgttgtgtggacatagggctccagggttaaatgtgtttgggaaatgtggtgtaagcaaagagaaagaagtttccactctaatacttctcagagactttaatgtggagataggcatggcgaatctctcactgcgggacaagtgggcaagagaagtgtggatgctgccttctgggcactcacagttggtggaggagacagccaacatgcaagcaggggccacaccacatgtctggaggttggaacgctatgcagagagaccacaggaaccatgggggaagtggggagggatttcccagaggagatgacatttgaacaaagatgcaaaggaagtgtggaaggaggtaagggagagctgtatgactgtctgggggaagagaaacccaagcagagggaacagcaagcacaaaggttctgaggctcaaggttgcttggtgcatttgacaagcagaccagcgccattggctggagctagctgggccgagtgggagggtgataatggatgaggttgaccacggtccgctcccaaaggccatggaattcagagcatactggagagcccttagtgggtttggacagacagtgataccttgggacacacagcctcatgagctcatactgaccaaacaaaccacccaaaatagcagcagaaacaacagccacagggtgcagagggtcattcagggtgcctctcacaagcctgggaagtaggcatgtgatatggtttggctgtgtccccacccaaatctcatcttgttttgtaactgcttcaattcccatgtgtcgtgggaggaacccggtagggggtgattgaactgtgggggcaggtctttcctgcgctgttcttgtgatagtgaaaatgggtctcacgagatctgatggttataaaaatcggagtttccctgcacaggctctcttttttgcctgccgccatccacgtaagatgtgacttactcctccttgccttcggtcatgattgtgaggcctccacagccttgtggaagtccattaaacttctttcatttgtaaattgcccagtctcgggtatgtttttatcaacagcgtgaaaacgaactaatacagcacggttaactcccattttacaggcgaggaagctgaagcttagaaagatgaaagaatttgcttgtgaccccgaacgttccctctggctgatgcattgttcctacctgctctgtttccttgtttatgaagcttgcaggctccatggtcctcaaccctggctgctacacactggaataacctggggtggcagactgtgtctccccaggatggccacaccaatacatctcacatcccacatgcttggccaatagcatatgacagatgtgactgtgggttacttctaaagctaggccataatagccatcgcaaccccaccgtgatctctgggattgctagttctgagggaagccagctgccatgtcctgaggttactcaagaagccctgtggagtaggccatttggggagggactgaggcccccaggcaacatctgtcccaacttgccagtcatgttagtgaactacccttgtccagccttcagatgacacctcatgagaggccctgagagagtcttattgtcccgttcaccattcctgttgccctgtggccagctaatcagcttgtggtggttttcatttcttttttctttttgccattaatagcaatgccaggctgggctcagtggctcatgcctgtaatcccagcactttgggaggccgaggtgggtggatcacctgaggtcagaagtttgagacaagcctggctaacatggtgaaaccctgtctctattaaaaatacaaaaattagccaggtgtgatggtgtgcgcctgtaatcctagctacttctcccaagtagaagggcgtgattcttctcatgcctcatgctgaggcatgagaatcacttgaacccgggaggctgaggctgcagtgagcggtgtttgtgccactgcacttcagcctgggcgacagagtgagactatctcaaaaaaaaaaaaaaaagtagcaatgccatagtaagtattcttctaattaagcccttctgaatcagcttaattatttgcttagggtcaatttctaaatgcacagttgctggatcagagtacaagtccactgatacagcatttaattttttcaaagaattgtgactgggccgggcacggtggctcatgcctataatcccagcactttgggaggccaaggcgggcggatcacctgaggttgggagttggagaccagtctgaccaacatggagaaaccccgtctctactaaaaatacaaaattagctgggcatggtggtgcatgcgtgtaatcccagctacacgggaggctgaggcaggagaattgcttgaacccgggaggcagaggttgcggtgagctgagagggtgccagcttgggcaacaagagtgaaactccgtctcaaaaagaaaaaaaaaaaaaaaagaatgtgactatagctggccgtggtggctcatgcctgtaatcccagcactgtgggaggcaagatggtcagattgcttgagtcaaggagtttcagaccagcctgggaaacatggcaaaaccctgtctctacagaaaaattagctgcgcatgggggcagacacctgtagtcccagctacgtgggaggctgaggtgggagcatcacctgagcctgggaagtcgaggctgtagtgagctgtgtttgcaccaccgcactccagcctgggcaacagagtgaggccttgtctcaaaaaaatttaaaaaataaataaatgtaactatattctccttcagtagcaacatctcaatttaccttctcatgcacagtgtttggaaggacatattttgggatgagttttcttttacttcactaccttattttgttctttcatagaatgcctttaaaatgttactttaaaaaaatagataatacctttacaaggtacaaaatccaaaaggtataaaaatgttttctttttttttttggagacagagtttcgctcttgtcgcccaggctggagtgcaatggtgcgatcttggctcgctgaaacctccgcctcccgggtttaggtgattctcctgcctcagcctcctgagtagctggaattacaggtgcccaccaccatgccctgctaatttttgtattattagtagagatggggtttcaccatgttggccaggctggttttgacctcctgacttcaggtgatccacccaccttggcctcccaaagtactgggatcacaggcataagccaccacgcccggccaaaaatattttataaaagtctttcccccacccctttcccctcagtcagcacaagtagccaccactgggaccagtttctggtggataaatccagaaaagttcaggtgcaagtaaacacacatagagagaacaccctttaaattaaatgaaactaaagaaaacagagccataggtgcacaggagacagagagctgacatctggggctgattgcatcttggtttcgagctgagtggcaaaaatactgctaaggtcaacgttctgaaggaggcaaaacccacacgcagaaccagccataggcctgtcaacaaggcgagatgttatcattgctcatgtgctgggtcaggataaggccatacagaccgcccagttctctctgatctgggtgtagttaatgacagtttatccgcctttttcttctctctcaccactccccatggtgggggaggagaaggactgggaggacttgaatactctgaattggcaccaggtgcttaatatagtcctgaaaatagaagaccaatatgctgttggcacataaagatgcccacaattctagaatctgagtgcgcccagatgatctctctttacatggcctaatttgggatcctgacaagttccttctgccctctgcctcactttctcaatctaggaatgggcctctcggtttttgttttgtctaattttaagctctcggctgtgcatggcagaggcaaacttgaagacgcaagggtcagtgagcagggcctttatccaggtatctcaaatatctcccaaccctgattaaagttacatatctcagagaagaatttggtcaacaccattgttgtcattcctggttaataacagggaagttgaggtctgggaagcaccctagtgatgtgttcacatggccatgtgcttctgtaaaatttaccaatgtaaggcatcttaacctcattctgttaaaaccactatctcctttcattccaacttccctttgcatcagatgatgttggggttggtgtgagcagtttgggcatcttgctaaaaggaccttaacatttactttgggtttagtgggatatatttatattgtttccagtcacttttgtgaaaaattattactaactgacctggtattgaaatggcttccaggaatatatccataccgagcatactgagctgactcaacttgtcgtggcatcaagattcaggatcagaggttatatctcaagatatatgaatggtcctacagcactcagttccacaagactgtgaaggagaggtttgaatgtatacacggagccagcagctagtttatggaaagtattacagatgtgtttgagacaggcagctaataaaaagaatgttatttttctgcgttttgtaacgtttgtgcaatttctcttttttttttttttttttttggagacaaggtcttgctctgtcatctaggctggaatgcagtggtgaaatcatggcttactgcagcctcaacctcctggtctcaagcaatcctccctctcagcctcctgagtagctgggactataggcacgtgccaccatgcctgactaatttcttttttccttttttttttttttttttgagacggagtctcactgtcgtccagcttggagtgcagtggcacaatcttgactcactgcaacctctgcctcccagattcaagtgattctcctggctgagcctcccaagtagctgggattacaggtgcccactaccacgtccagctaattttttgtatttttagtagagatgaggttctgccatgttgtctagattggtctcaaactcctgagctcaggtgatccaccagcctcggcctcccaaagtgctaggattacaggtatgagccaccatgcctggccagctaatttctttttaaaatttttttgtagagctggggatctcgctttgttgcccaggctggtctgaagcccctgggctcaggcactccttccacctcgacctcccaaagtggtgggattacaggcatgagccaccttattgtggtttcttgtctctttctaaccaaatcttcactttattacttaatttcatatctgtaattttttcttaaagaggtctccctagggctggacgtggtggctcacgcctgtaatcccagcactttgggaggccgaggtgggtggatcgcctgaggtcaggagttcaagaccagcctgaccaacatactgaaaccctgtctctactaaaaatacaaaaaattagcgggtatggtggcgggcacctgtaatcccagctactcaggaggctaagacaggaaaatcacttgaacttgggaggcagaggttgcagggagctgagatcgtgccattgcattccagcctgggcgataagagtgaaactctgtctcaaaaaaaaaaaaaaaaaaaaaaaaagaagtctccctaggctgaagctacctgctcaatcttctcttgtgtcttataggatcacaggatcccccttgccttacctcactgttactcccaaacagttctcacatgtttacaagggaatgtaacagagtggatcagagaattcattctggatccagaccgaccttagttttctcatctatataatgggaataatagcaggatctctcgccttagatagtcatgaagtccaatgagatgatgtgtataaagccctaacacaatgtagcagagggcacagggccaggattgatatttagctggtcctcacggatacagcagactccctgtttatgacagtggttggctctgatttggttggtgtccatgccagagtgtacaatcattattagctattgatatattattagctccctcccctgcccacccaggggtttacgcagtaagttctcaattattggcaatccaaacaaagaataaaagacaccagctggaatgaaacagagaagctggttccaaattgagcaattcagactgactgctataaaatttcctcaccttaaaggcccttagagttaattcattctaatccccctaaaaatatacttttttgacatgttcaagtattggaaatttggaaaattcacaaaaacacaaagaagaaattaactgctgtgattatagatgattatacacatatacatatgtatttaatacatatttatgctgtacatagtgttttgaagcatactgtacttcaaaaaaatttgggaggggtgcattggcttatgcctgtaatcctagaaattcaggaggccaaagcaggaggatcacttgaggccaggagttctagactggcctggggcaacatagcgagacccgtagcttgacatggtgatgcgggcctgtagtcttagttactctggaggctgaggtgtgaggattgcttcaacctaggttacagtgagctatgattgcaccactgcactccaccctgggcaacagagctagaccctgtctctaaaaaacataaataaaccaatgtttaatacttagcatttccccctatctttaaatatcttctagctacttcacttttatttttatctttttgagatgatctcttgcccaggttggggtgcagtggcatgatctcagcttactgcatcccccacatcccaggttcaatctattctcctgcctcagcctcctgagtagctgggattacaggcatgtggcaccacgcctggctaatttttgtatttttagtagagacgaggtttcaccacgttggccaggctggtcttgaactcctgacttcaggtgatctggtcgcctcagcctcccaaagtgctgggattacaggtgtgagccactgctcctggtagctacttcacttttaatggctgcataatattcctcatcagaaagtgggaaaaattaggctaggtggcgtggctcatgcctgtaatcctagtactttgggaggctgagttggtagaattgctagagctcaggagtttaagatcagtctgggcaacatggcaaaaccccatccctacaaaaaatacagaaaataccgggtgtggtggtgcacacctgtagtcccagctacttgggaggctgaggtgggaagattgcttgaccccaggagattgaggctgctgtgagctgagatcctgccactgcactccagcctgggcgacagagtgagactccatctcaaaaaaaaaaaaaaaaaaagaaaagaaaaagataaagaaataaataaagtgttaataattaaaagtacttttagagggttatgtcataagccttgacaagacttgttctgtaaagctacccggcatgcaaaaagctcaattaagttagctcctccacaggatggaattatataaccaatccctttcaagaggcattgaagttgtttccattattttgctatgatgaataaggctgagcaatattaatctttgctcatatctttggtcatttcctttgtaaatttcgggactgctgggtatgcacattttaaaattaactcactcatcatcatgcagttaggagaacagagaaaggaaggggcttgcaccgggtcacatagggagttagcgtcaaagtcaggactaggaaccagccagggccctctaactggagctcttccagctggggtcctagaggaagtcccagctggccgcgggagggaggaggaggaagggaaagaaccaggcgccggggctgaagcggcggcaggaagaaggtggggccggctgggaggagcgggcggagctgctgagcagcgcctctccttcgggcgggggaagctaagcggtcgcctggcaaccctggcggcgcgccgttcgaacggaagcgaggaaccaatcaggaagtccggggcgaaccattctggtgtgaaggggggcggcgtgctcacttccccttccacggcgccccagggactttccctgcggtgggggccttcgacagtgagggccacccgctcagctcgaccgcggagggcagctccaaaggggaccccaaaggtgcccacgcggggctggggcctcctgggcgtcgttgggagcggccactaccggcccgggtccgagctgtcagcctctccaaagcctgcgcgagaggagccgggacacgcctagcgcgggctccaggtgagggcgcgggtgggtccgggtgcgaccccgggtctgggggccccgttccccgagcgtctgctgtctgctttctccccgcgtcgtacctgcgtgtcatttcacagatgaggactctgaggctcagagaggcaagtgtcccggcccggcgagctctggcggagaatccagttcaagtctttctgccccacctcgcagccccctagtctagtcacatctggacttgccttgagaggcccagacgggcaactggtagtcattttcccagcgttttatcggcagggacctgtagacccctggctggatcacatatccccgcgccccacactgtcctcgggataccccctttgggcgtctgtctttccttctccgcagtccggggttggactcggctcatttggcgcctttctgtctacggggacagaggaccactctttggggatcggacgggactgacatttctgggctggatgcaggggcagcagattctccagcccccagagccgctgctggcctcttgggaatcatccccagtttggggaagggaatagagccagtccctaaaccaaagccactagtcaccagagactttggaattgggagtggggccggaatccccccaggtggagcagctgacctaggccagaccctgctgtgtctcctggggacaccccctgccccctaggttgctattgtcagtctccttttgtaggtggggaaacggaggttctaagaagttaagccccttttcgaagtcacagtcagacaatgcagtggttagctcctagtccctctggcttcaatcttagaatccttgacacacagaatcatgcattttgagagtcttcaatctcttcataagggagttacatatcctctctcctctggagcctgcccctggctttgggggacaggatctccgaggactcagaaagaaaacaaggctttcttttattctttcaacaaatattatttattgacttcataagccctgctctggttcttgcatgttttggtttttttacttattagcaaatgtatcatcttctcccactgtgatgcaaggcaggggctgaggcaattgagccagtgcaaaatttagggatgcccaaaacctcagtaatcaagactgaaactaacgttcatggaccatttgtgtgttctgcaggcaggaggttaactcacacagccttcatgaagtgcagtcctcccatctctctctctctctctctctctctctctctctctctatatatatatatacacacacacatatatacacacacacatatatgtatatatatgtatgtgtgtatatatgtatatatgtgtatatatatgcatatttataaatcatgaaaccactgccctgtccctgagttgctctgtgacattgagtaagtttcttcagtctctgggctgagctaagaagtcatgatggtgcactcaggcctgggcagagggcagtctaggataggaagtgggcttggctgtggatctgcctccccctcccctttctaatcctgcgtgccaggcccttccccaagaccttgcatgtgttatcttccattctgtcctcactgcaaaatccttcatccccattttgcaacctcaagtgcagacctaggcctagaagatcaacttggtatcagtgggcctagatgtccacatccacacccattccacagcctactcccttctcccttcctaatgttagtgcaaggccaccctgagcaaggctgactcctgggcaggccagggcaccagcgtctgggaggcctccagaaatagctcagggcctggtgtggctctggaggtggcccagctgggtgtccctgacctggacagctgggctgaaattgagctggggctgccctgctggctggccccttgccactgcctggagccttcccaatctcctctggggcaggcaagggcctccccaaatctaggccaggcttctgctgaagggaaagaaagaagcaggtgggaggaagggggcgggttgggtgtagaatgtcatgaaaattataacctttggaaaccacacctcccaccccctcaccaaagaataaaaatcactaacacctcttgagcatttactatgttctaagtactttacaagtatgaactcatttaattccctcaactctgtgatataaggtaattactgctgttcttatttccatcttgcagaggggaaactgagcacaagagaggtttaataatttgcataagataacctagaggtggagtttgaacccagagagtctggctctaaattttacattttttgggggggggggtggggtggggcagtgaatgaattaaaatgtatataaaataaaatttaccattgtaaccacttttaagtatacagttcagtggcattaagtacattccccattgcctctccccccagtgcctggcaatcaccattctactttctgtttgagtgaatttgactactttgggtacctctaggtattataaatggaatcataacagtatttgtcttgttgtgtctggcttatttcacttagcataatgcctttaagtttcacccatgttgttgtatgtgttagaattttcttttttatggcggaataatctattctaatattctatgtatatgccacattctgtttatccattcattccttgatggacacttggattgcttttggctgttgtgactaatgctgctttgagcatgaatgtacaaatatctgtttgagttcctgtttttaattgttttgggtatacactcagaagtggaattgctgggtgatcctatggcaattctgtttaattttttgaggaactactttactgtgtttcacagtgactgcaccattttatgtgtccatcagcagtgcacaaagtgctaatttctcaacatcttcaccaacacttgttattttctgtttgtattttttttttggtaatggccatcttcaggggtgtgatgtggtgtctcattgtggttttaatttacatttccctaatgactaatggtgttgagcatcttttcctgtgcctgttggccatttgttatctttggagaaatgtctgttcaagtgactctgcattgttttttttttttttttttttttttgagacaagagtttcgctctgtcgcccaggctggagtgcagtggcgccatctcggctcactgcaacctctgtgtcccgggttcaaatgattctcctgcttcagcctcctgagtagctgggattataggcccccgccaccatgctgggctaatttttatatttttagtagagacggggtttcatcatcttggccagtctggtcttgaactcctgaccttgtgaaccacctgcctcagcctccaaagtgctgggattacaggcttgagccactgcacccagtcatgactctgcattcttaaccattacctgtgcttctcttagatttgtaacctctgagaatagtggatcagctttctgggctgatgaagccctccctcaggagctgggcactggatgatctatttggttgaatagttatcatagcctgcactttggtgacatttgtcatgcatggacctcatgcagagagggaggcactgttgtgagtcctgttttgcagttagggaaactgagatatggagaagttgagtattttatccaaggtctcatagctaatcattggtggagctaggatttgaatgggttctggagtccatgctataccttacagatatggccagggggatggagtagtgaagaccactgcaggcagcagaaccagtgtgtgcagaggtttgtatatggtggctttggagaaagaacaggacttgggtagaagtggtcagagcccagcttgaatgggggtgacttgaagttggaggaagagtaggacaggtctggaaaggccaggagcacggtgagggtttggggaggaggcttggtgcttagggaccctgtccttttttttttttctcttctcacaagatatttattaattacaaagggaaaataataactgtacagtggagaaatttggcagatactgccttaaccaaggaattggctgatcactaagattaagacaaactgttgttatgagtgggtgtggtaatgtacctatagtcccagccactcaggaggctgaggtggcaggattgcttcagcccatctatttgaggctgcagtgagctatggagtgcactccaacctgggcaacacagtgagacctcatttctaaaaaaagaaaaaagaagccttctgataccatgtactaagaaggacacaacatcacttttgtgttattcttgacagatatgtttaactttctctcctttctttcttcctctctttctttcttctctctttcttactgatataagaaaaagctttatacatttaatatatacctcttgatgagtggccttggcctttgaggtgggctgggtccagaacagccggttgttcaacggtatttcctcgtgtttggtccctgaaggaagaaaattggaagggtgtgatggagctcatggtccagtgggagagacaggaaacgagttatatttcctatcctagataagagtatctaaaatgacaggatgtaatgagtgctcggaagggaataaaatgggtgaaattgctgagggggtctcttggaggagatgacatttgaaatgagatctgaagggggtgagggaagaggttccagacagagaacagctggtgcaaaagccctgaggcaggaaagaccttatgttcaggaacagcagggagggctttgtggccagagcaggaaagaggttggagataagatgggagatttggacaaggactgagtcctggaaggcctgagggccaagtggggagcttggattttttttttttttttttttgagacagagtcttgctctgttgtccaggctggagtgcagtggctcaatctcagctcactgcagggagcttggattttattgtaagggagccacaggagggtttaaacacagcagtaatgagactttatttctgctgggaaaacattgccgttattgcccccattttacagcagaggaaaccgagactcagaaccatgaccagggagtgcttcctaaggtggtttctccctctggggtccagccgacgaggcagtagattccttgggacttccttggggggcacatctggtgagtggccaaagcccaacactgaaaacaccgtctcttccacctcccctccccagatgtgagcctgggttccaatcctggctctaccattaatcagctgtgtaattttgggcacgtggccttacctcttggagcctcagttttctcatctgaaaatgggcataataatagtagccctcacagggtaggtgtgaggattaaattagttaacattttgtagagcttagaacagtgtctggtacaaagaaagtgctcagatgagatttgttcttttcttttttggctgtaagtttattcaatgtgaaataatcctctccaattttattgaggtggctgaccacgtccacgaccacatctgcctctaaactggaattcggttgctgacccagccccagcctcggctttcttgtcagcaccagggggcacagaacaccgtctgtaggtatctctgtcagcttcccgtcttgtgagtcttgcaggtcgcttaccctccagacctttaggccgaggcctgccagtctctggacggctgcggtgtagggtggcaggaacaatctccgggggcagatgtagggtggcaggaacaatctctgggggcagatgaaggtaatcacggagatactggctaccctcattggtaaggtaccagtagaaatgtctccaggcaaactgttccttcacgcagccccgggacttgagagactgcatggccttcatgacgtgaaggttgggcacattcttgtctgccagctccgggtgcttaggcatgtggacatccttcttggccaccatgactccctccttaaaaaggagttcatgaatggcaatccggttcttcttaggcatcagcatcttggcagctgtagggtccggggctggggctggaaaggaaggactgttcttttctttgctattacgaaaatcattattgttgctttgctgttactactattagcgcctgaaggagccttccctccccatcccccatttctgcctccgtggagggctaggcagggctcagcaggccatttggaggatgaaggacttgttgccccgtcccctgtaaagtcagggactggaggaggctgcagtgctgagggggaaggaaagctgatgtgcatcactgccggtctcctcatgccctgtaccctagtcctggcccagctcccacaggcacagacatggaacaggagcctcttcagcctgagtgtggcagagggctggggctgaggcctgggggacagctccttctctgggcctcaggattcccatgaaaaaatggcctatcaaatgttcctacctgcagtgagttataggacttggggtggaagaggtgacagtcacctccctctgggaattccttcctgcagggctgcagtctcatgggattaaatgagggggctctggggatttaaatgagtatggtgcctggcaccccaaaattctagttattgttgttactatgacggctgttgttgccgatgttaaccgttttcacaaggcagctgaggcatgctcaggctcagcctgttccagagggatggactctacacgtgacagcatggagcaccaggagggtcccgcagcctggtcagggacacacagctagaaagtggtggcgttaagccttggtctggagggaaagtgcgcaggctggactccccagagtgattttgggctagtgactcagcctctctcagcctcagtttaccattagtcaaatggggtaacaatagaactcaccagatagtgattgttgggaagattaaaatgggttacccgataccaagaaaaacactttcccgtgcctggcacagtgaacatcacctggcggtcgttctgagtgtcagggagcggggctcagtttgtccatctctaaggtgggtgcgcttgcctgccagagccacggggaccccgcgcgccaggtgtgcggtgggcgggtctcggctcccggaagaacttccctgggtggtcctggagcgggtcggacccagttcctgagccaggccagctgccggcggccggggctcgggttctggcccctgcctggctttccttacccttttcgggtagtacctggaccagcgggttcacttgcccgcggccgccggaagttgcgcaaactcagcttgccggagccccaggtgggccgggccggaggagcgcaggccagcggcgcgggcgcagccgggtacgtgcggaccgcggcggggggcgcccagccggggtagggggcggcccgagcacccctccaccccaggacggcgggaacggggcagggatctacctttcggcttcaagaggaccgcggggatggtgccgctctctccctcatttgagagccaggaggggcggcgaggggcaagggtcacacagcgccctgctagccgaccccccatcccccgccaccgggagtcctcaagcttttccggaattgagggagagcaaaagccagcctggggatctgagttccccccagccctgccccgcggcctctggaggctgacgctggggagctagtggggagggggccaggtggggatgcgcgcccccgggatgcaagccagaagggccggcggttgggggcatccgtgggaggcatttgaatccgtgggtggggcattgggcggtgagaggaggcctcagaggggacattgagtcgcgcttggggacttgggaccctggcttcacctggcgggagccgctgcacctccgtttgcccacccgtgacgtggggctgttgaggtcagctcaccgatcagcctctgtcttgggcctgctttgtccgcggtgtgggctgggacagaccctcgtggggcttgcttagagacccctgcgtgggggtggtctgtggacttggttagtcgaaatcttcttgaagaccaggagcctggttcgtggctccgcctttttgccagatgccgaggaaagccctcgacctgtttgatctctccatccttatcgtgacctggaggctcaggaaggtctatttttaacctcgtttcacggataaggtaaccgagtctgtaaagaggcgaagctgcttgcgcaaggcgcacagcgggcgggtgggcgagccgaaggccggcgggcccgcggcgccaaacccggggttggctctcgcatctgtcccggccccgccagaggggacctcagggccagcagatggggccagaggggctgggggcccgatcggggtcgtgcacggggtttctgccccggccccgcccgtctgacctccttctccctctttatccggatggtgcccgcaagggaactgccactgcggacgggttggactggtttgggaggtggcggcctgggggtggggcagagtttggctggctctgctgtgctcctttcctgtcaggtccttcccacctgaggtctcctgggggtcggccctggtggagcgaggcttcctttcccatccactccatctctcctgccttgggagcagcacccaaggatctattcccaactcatggctgctgcagaggtctccagctggtggttgggggccagatggaggaggaggggacagatatgttcgcagacatattttgtttgctgtatatgcaatgttttaatcattattatcgaatatgctgacagttaagaatctagagtttttatgtactcctggatttccagcttcctggaacaatacacctaccaccttggacccatatgcctgcagcaggcagggtacctagatgtctagttcatccctgatcacccagttcacatctggctcccataaatatttcagttcaataaatttttattgaatattctgccctagtatgtgtctagggcagtatcttgaaactggggtatagtgaacaaaatagccaacccccgcccctacacacacacgcctgccctcatggagctgatattttagggggatagagacaacaaagagtaaaacaaccatacacaaatagagtacttgtgcaggggataaggagaaaaggaatagtgccgggagggggtcaggagtgccggggagaaacaggacgtggtattgagatcagtgccttatttatctattctgggacctgggaaagccacttctctgagtctcagtttctccatctgcacaacgacccacaggcttgtgggaggttatagggaggatggcacccagcagagatccctgcctccccaccccaatccagactcactcccttctggatttttggatgtctaggtggggctgtccaatgtagcttcctaccatggatggaaatgctgtactctgtgctgccaaacacagtggcaactggccacatgtggctattgagaacttgaaatgccactagtgtagctcaggaactgaattttatgtttttatttcatttaaatttaaagttaaggttgaatagccacatgtggctgctggctattgagctggacagcacgggtctagatggcttgaactgtaagccttcttggggaacacccagattaagtacccgccccctccattttacagatgagaatgtttgggacttggtatgtgggttttcttctgtcccatctccaaggggccttgtggggtgactctgtgggcttggcccttccttggaaacagggtcagggttggcttgatgtctggggcatcaggtcctgacacttgggtgaccacgtagacacttgtgcatccaggtgtatgccctcctcccaggtgagtacccattccatggctgcaggcagatcgagggtctgccggatgcctccatgcagggctgtgtgattttggacatttccagcttctctcagcacagcatagctcagggctgatgtttccacgtgacaggcatttgtggatcaccgtgggccatccagttccatgcaggaagctgacggatgtctggactccactggggcgcgggtggagattttctttgctccttccctataagctctgccctttgcctggggcctggcatgtctaggcgggtggatggcacagggcagcttcctgcctggatgggtgaggggtagaggtggtaccaggctccctgtggggagtccaggtggggtgtggggctggagccctttttcttggtcatttaaccctacgccccggtgccagcaccttcctttttggtggtcaggggcagagccacctactcgctgggttaacttaagcaagttgtttgcctctctgggcttcagtttctccatccaaaaaacggggctgttgagaggacctgaggttgagttgactggtgcgtagcacagagcctggagcctcccttgctccctttagcgcgtgccttgccctgtcttttctgctcaggttgcccaggtcgcccaggtcttttttctctagcaccttttttcctctcttggtctcagctgggcctggttctcccggggcaggagggagggggtgtgggtggggcctgaggccccgcagctgctgccttgtgcctgctgattggctccttgtggaggggcgtggtctctaccttataatagggagggcgtcttatcctctcagccgcggctgagcctctttgtctgagcgcgctcggcttttttttttttttctctctccttccctgcagcagtggccggtgtccagctgcctactttctgcccggatctctggctcctcatctctccggtctccgcagactaaagccctcgggatatgcagcagccatgcctgtgcacacgctgagccccggagccccgtccgcccccgccctaccttgccgcctgcggaccagggtccctggctacctgctacgggggccggcagatggtggagcccggaaaccgagcgctgtggagcgcctggaggccgacaaggccaagtacgtcaagagcctgcacgtggccaacacccgccaggagcctgtgcagcccctgctgtccaaacagccgctctttagccctgagactcgccgcacagtgctcacgcccagccgccgagccctgcctggcccctgccgacggccccagctggacctggacatcctcagcagcctcatcgacttgtgtgacagccccgtgtcccctgccgaggccagccgcactcctggacgggccgagggagccggccgtcctcccccagccacccctccgcgaccgccgcccagtacctctgcggtccgccgggtggacgtccgccccctgcccgcctcgcctgcccggccctgcccatcacccggccctgccgccgcctccagcccagcccggccgccgggtttgcaacgctccaagtcggacttgagcgagcgcttttctagggcagccgctgatctcgagcgcttttttaacttctgcggcctggacccggaggaggcgagagggttgggtgtggcccacctggcacgggccagctcggatatcgtgtccctggcagggcccagtgctgggccgggcagctctgaagggggctgctcccgccgcagctcggtgactgttgaggagcgggcccgggagcgcgttccctatggcgtgtcggtggtggagcgcaatgcccgcgtgatcaagtggttgtatgggctaaggcaggctcgggagagcccagcagctgaaggctaggcgccactgggcctggaattcgccacaggacggatcttacagaggcaagtggtccctggacctctcttgcatccattctctagacggccgtgtcagaggctccaccctgttgtgaacttggtatggaggcaaaggcttagaggctggaccagcattgttgggcaaggactgactctccaagggttttgttcttggctttggacacctgagaaccccctcctcccctcccccaatacaaggtttttgacatgagtgtactcctgcttagttcctcttgtggggctgcatttgcggtgctttgccctccccactgtgagtgaggggccaagggatctcctcaatcctgtctccccagcggctctgtttcctccttccttccttggcctctgtcctttgctgacttcctcttccttacccagcagaactcaccctggggtcggggcagtggggaggggcctatccactgctcttcctagtccttggcagctggcctaggtgggcagactataggagggactggttaggagtctgcattgctttgacttccctctccttggttaataaacacaaatgcttgtttctcaagggctgggccttcagactcttctgtgttcacaagagaaagggtgagagaagtcttggggtggggccatcaaaacagtaattgttcaccccgaggtctagtggtggggcatgatgatagcggctggcctggctggagacatgtccccgtggtgggttctcataactctcctggaaggctagcaggcctgcctcatcgaggaggaaactgagatccagccatgagtgagctggaatagagctgggagtaggaatggggtctttcccctgcaccagaaagggagcctgcaggggaaaggccgatggggtgcatagactctccccaaccaggagtgttccatccaagccctgcccagttcccaagggggcaggaagctcggagagggcaaatcctgaacttgaggtcacacagaccatagagtgaggatgagaagtgggagttttggaggaagagagacttggggtggacggcacaaaatgagtggcctccctggcgatcttggacaagccagtttccctctgggcctcagtgggagagttaggcagcacagtcctccttgggttggggcactggtgcattctgggcccttcatgctatattccaatacctggggagaggggaaggaaggggctggcactgggcttcgaggcctcagcttcttccagtctccctccaggtcagttacctactaggacaccccaccttggctagtggagcagctagggctagagctgggcctacaaagggcgaaagcgggggtggcctctctggtgccccacggtgggcgtggagagggggtgggtggcgcttcctttcacaggctgccttggctgcagcactcagaaacaggaagctctaatgggggccctggtgacaggtttgatgtaggttttattttaagcataaagaggagatttccgttggactgttgacaaacatccacatcagcccagctgtccatctctctgtctgtctgcctgtctacaactagcccccaggggcctgggatgggcctgggcagtttggggaaggaagggaaaattgggttctagaagaagatggtgttccagctcatgagactggagctcatgatactggtggggagacaagcatgaggagggtggtgacctacccacaaccccccatggtgcccagcagttttgacaatgcaggagctgggcctccagggtccccatgctgaaggagtgatggtgtcaggagagagaatccaggcaggatctgcagacgtggtgccctttgaggtgtcaaagactagatttcctaggcaaccctgctagaattcagggctagtcattgccccttgctgtgacctggcagcctccgagtaacccaagaaggtggatgggctggctgcattttacatgtgaagaaattgaggttcaggtcacaggactggtgggtgacaccttgtttctgaaggagggtacagtgcttgaatcctcaaggtagccttttgaggaccagatatattgtcagagcaggaggttgagctcagggaaggatagcgacttgtatactgtcacatagcaggtctgcaggacagcctggggtcacactcttgcctgccagacacatcgcagtctggattcctggttctcccagcatgtaccccaccactcttcctcatcttggcagccttttcttctggtcactttattactgagcatctactgggtgcccagcagtggataagacagacatggcccctgtcctagtctggagaagagaatgggcaactaaacattcagcacataaataatcatagaatgtaaagcaggtatacttagggacttctgccctaaaaccagagctgttcccaggagctggaccaggggatagctgaaaagagaacgcctttccataaatccactgggagggtctgttggggagagagcagggagggattcttggaagtggggaaggtgccagattgagtcttctccaatggttatggcttggtcttgggagggctccccctgttccaggattctggagcctcccgccttccctgcaggcctctgtggagggagcagggcggggggcttttgcactcctccctcccccaaccctgcagccttggggatctgtggaaacagcccctctattgttctgcctccagttggagtgtgagccctcggagggcctgcagctgctgccctgtctcctggggctgcccagccctccgaagcagctcccccaggccagcctggccccagctgcctagcccctaattaggcagagatgggatctgctctctgatccatttcccaccagctaattatatacacgtggatttgggaaccaggcaacctggctgctcacttctatcatgaaggtggatgggccctgggaaaggcagccccccccccacagacctcagtttacccttttggcagaggatggagtgtagctgcagaggcctgttccctgtccttggttaaatagttctgttcctgctactgaaacatttaaggagaccccccacccccatcttacctgatatcctgtgtacaggggaccaggaaagggttgaggaatttggctataggtccttgactctaggaccccagggtagggtcataggatatagatgagagcatggctgcagctggctgccaattagatgtgcatataggagggcttacagttgtgctggtccatctgggtggcctgaacacccggccgggtgcggtggctcacgtctgtaatcccagcactttgggaggccaaggcaggcggatcacttgaaaccaggagtttgagaccagcctggacaacgtggtgaaatcccgtctctactaaaaatacaaaaattagctaggcatagtggcggacacctataatcccagctacttgggaggctgaggcatgagattcgcttgaaccctggaggtggaggttgcagtgagccaatatcatagcactgccctccagcctgggtgacaaagaaagactccctctcaaaaaaaaaaaaaaaggagtgaacaccccatccaggtttttaaaaaggtaatattggttgatgggtacagcaaaccaccgtggcacatacatatctatgtaacaaacctgcacattctgcacatgtatctcagaacttaaagtagaataaaaataaaataaaaggtaatattatttttcagataattcactcatatatttcttccaacattttattaagaaaaatttcaaacatagagttgaaagaattagacagtgaacattcatatacccacctactaatgcacacttgttaatatttcactatatttgctctatcaggaatctacccatctctccatccattaatacaacttatttttttaatacaacttattttttaataaagcttttcaaattaagttgcatatatcagtacacttcccttaaagtcactttagtgtgcatgccattagctagaattcaatatttgtttgtcttgttcctctctaggtaacatttacatggaatgaaatgcacagatcttaaaggtgccatttgctgaatttagacaaatgcatactgtaccccaaacccctatcagggtatcaagcattatcacctcagaaagtttccttgcatcgctctcctgccgattgctgcctgcccaccatggacatatttttatatccatatatatcagtactaacaagcagcatcccttgtcctttcctctacatcagcctcgctccccaaaagcaaccacttacaacttcttaaactatttcttctggtactttcctccatatttttaaataacttgcttttcctgctgttttcttgatcaattttaggcatacacacacacacacacacacacacacacacacacacacacatatatatttattttttttttgagacagaatcttgctctgttgccccggctggagtgcagtggtgtgatcttggctcactgtaacccctgcctcccaggttcaagcgattctcctgcctcagccacctaagtagctgggactacaggtgtgtgccaccacgcctggctaatttttgtattttttgtagagatggggtttcaccatgttgaccaggctggtcttgaattcctgacctcaagtgatccacccaccttggcttcccacagtgctgggattacaggcgtgagccagtgtgtctgaccaattttaggcacatattgactgactttctggtctgatgttttcatagtgtggcctccactgcctggctgcctggctttggatcccagcccttcctctttctggctgtatgaccttgggcagtaacttaacctccttgggcctcagttttctcatttgtaaaatgagggtgataataatagtgctgaggttattggattgttatacggattcaagatgtaaaaggctgagaataatgaacatcacccagtgagtagtcaaactttttcttctcataatcattattatcaagaaagatttagcttttggttcccccctttcaattggcatttatcacaattttttgtgaagtggattttagtgttatttatattatgactatgtaaatactgtttcctttcaagccaagtcatatattttggttacatttcctttcttgtacaactctttgttcttcctggagttactactcgctttgctttttttcatttgctgtttcctcttaacccatccttaattctcttaattctttgacaccctcagtctccccatagttaacattacacatcctgaaactcttcaagtgcttttaaagaagcatccccatccatttaaaaaaaactggagccaatttttaaaatagaatctcaaatacaatctgtaaaataaagatttgtgagcatccactatgtgccaggagctgtgctaggcagagtgggaaggtagccaaataggggatatccctgcccatgtgggtttccaagagggatgaaaactgaagctccacacccccagcctctgcatttaccggggaacacctcagcacctctaggaatctcaggacctcagggagcccagatttacttatttgtaaaatgaggatcattttgtcattctgcaatcactccttaaccatgttgtctggggctgtgttgtggctgctgggtatagagcaatgatctccccatcccttgaggggctcacaagagctgtgggatagagcggaggctgtggattgcagcggagcaatgggagctggggagcgggtttcccagaggaagtaccataggacgaagagggtcttggtgggtaagggcagtaaacggctgttatgttccaagggctgtgcgaagaacttccatgtattgtcccatcaaatcctcccaaagacccattgaaaggggtcatatttttatcacaatttcatagatggggaaactaaggccaggagagtccaaggccagggtcacacagctaataagcggcagaggcagtatttgaacctatgcagttgggttcttaaccacacactgcactgtctctcacatccagatgcccagctcctgtccccacctcatcctgtatctgcctcgtcctctcctgtctacccactggtgctaacctctggctcattccatgcccttcgctttattcatccattcattcaacacaaatctactgggcgccttttccacgcccaaccctgggctgggcagtgccagggacatagagcttgggcagtattgactcacccattcccagataggcattgacattgacatgcaagcggccaggaaagttgtctaaataaaggggtgtttggggttgagtgatggctgtgtgtatgtgtgtgtgtgtgtggcctgcaaggggtgtgtgtcagtgtggcagcaacagactttctgtggaggccatttatgaaggcatatctgtgtacccttgagagtgtgttgtctgcagagggtgtgtccaccaggtatgtggatcagtgaggctctgctgcataacaaaccactctaagcccagaagcctaaaaccacttattagcctgtgtgaagtggcagtctggcctgggcttagctgggcagttctggttttacctgggttcacttgccttgctgcagtcagctgagggtgggggctctgggagggcttcactcacatgcttagcagttggcaggctgtttgctggggtgcctccatttgctttgatgaggctggcttgggctcatgcttatggtgacctcagggttccacattcagcaagagaagataagctccaacgcacagtgcattttgagcctctacttgtgtcaagattataaatgtcctaatagcccaagtgacatgtcaagtcagattcaaaggatggagaaatagactctctctctctctctctcggttgtgtttttgttctttgaaaacaagcccggcttgcctggctccatcgcccaggctggagtgcagtggcgcgatcttggctcggtgcaacctccgcttcctggttcaagcaattctcctgcctcagcctcctgagtagttgggactacaggtgcgtgtcaccacgcccagctaatttttgtatttttagtagagatggggtttcaccatattggccagactggtctcgatctcttgacctcatgatctgcccgccttggcctcccagagtgctgggattataggcatgaggcaccgcgcctggcttagaatccatctcttagtcacattacacagggcatgagtacagatatggaggaattattgtagctgattttcaaacaacttacctgtgtgtgcaggtaaagaactagggacagttctcagttttggaaataaaaaaaactctgggctgcagtcctggctcttccgtccttgctgtctgaccttagtcaagttgtctcattctctgagcttccgtaaattggataaaattgaatgaaacgagatgatctttataaagtgcttgtgctactcatttgtttacaaacgcagcacatatttattgaggcctcctatataccaactactggtcccaccccgaggatattgcagtgaacaaaatggaccaaaacacctgctcttgtgaagctcacagcctaggttgtagacagatgttaattgatcatcctaataattgtatgaccattgagagtagattccggaaggagagattgctgacctggccaggttgatctgagaagccaaagatatttaagctgagatgtgaagggtaggtaggagacaacgaggagaagaaagataggagtggaaaatgattctagatggagggcatgtgcaaaggccctgtggtgggaggagtagattccaggaacacagagaaggtgggtggggctgggcctgaagcaccagggccagatggtgtggggctgctggagcctttgaacaatgtgagggtctgtcttgccaggcagcctaaaataaaaccgaaaggcctaactgctccacaaggccctcatgatcggggaccttgttactcctccagtctcccctttacctactctgctgcagccatgctgcctccttcctgttccaggaacaccctggacacattcccacctcagggcctttgcacttgccattgcctttactagtatcgaccctacccagatattctgatgactcattctgtcacttcatttccatctctgcctcttcaaaggggccttccctaccaacccaccacaacccccctgcccctccagctaagcagtcagcatccagcagtctctacttccctggcctggtttatttctcttcctagcacatatcacctcctggcttatattaaccagaggccacattgtctgtttctcttctggatctctcaccagagtgcagctcagcaggcagggacttggccttgctctaggctgtgtcctcagcctcaggggaagagtaggcattccataaacatttgtgaataaagaaatgagtgaaaatgagtgagtgaatgctggaaagaactagctcctggaaattaggaggtctgggttcaagttctagctgggcgatcctttctgttccttggtttctccagttgagctgtgaggcatttgtggtctctagggaggttctaggacaggaaaggagtactccaggctgtggagggggcctatgtaggaagaagggagctggggccttccctttggccttctggcgtttgaaaatagcctagctcagcccctagcttgggcccctaccctccctggggtgccaagctggagccagggggctctgtctggagcctgccagcctggtgccgggctgggatcaaggccacctgacagctgggccaggcagtcctggaaggttcttaagggcaaacagggcatgctggatgtcccagacctccctccccacctattgtccctcctccctcagtgtccaccggcaggataaatcccttcatcctctacaggcctgcagcccttgcagcttgcaaatctttttcttggtttgtttctaatttcacccctgctcagtagctactttactggtgaggacactgaggctcagagatgacaactgcctcactgaggttacgttgcagttatgattcaggcccaagtcttgcccagccctgtcctgtcaccgcgtgcacgtgtgtgtgtttgtgtttgtgtgtgtgtgtgtgtgtgtgtgtggtctcactatcaaacagtgccctcccttaaccaccagtgccccgggtctctgataagatgtgatgactatgagcacctggagccaggtggcctgggttcaaatcccacctttgctacttctatactgtgtggattgctgggccacccccacctcagtgtctgctaataggacaaatcccttaatcctgggcactggggcactatcaggactagcattgtatacattgcacaggttttaaaaaatgtaatctgtaggctgggcacagtggcttacacctgtaatcccagcattttgggaggcccaggtgggtggatcatgaggtcaggagctcaagaccagcctggccaacatggtgaaaccccgtcactactaaaaatccaaaaattcaccaggcatggtggcgggcacctgtagtcccagctactcgggaggctgaggcaggagaatcgcttgagcccagaagctgaggttgcactgagccgagattgtgccactgctctccagcctgggcaatagagcaagactccgtctcaaaaaaaaggtaatttgttgtcaatatttacacatctaaaccattggaagaataatgtatatataaactagctaatgaacacctaccaagccccaagcaccaactgtatgtccagtacagagccagctgctccaggggagttcgttcctgggagggggcatcatgatgaagtgggcgtggttcccatttcctccagcgtagtctcagaagcgggaagccatgtgactgaggttacagccagggagggcagaggcccccggcactcacccctctggggtccaagccccgctggcatgtgttgtgtccctgggtaggtgtgtcactccctgtctgtgtctccagtgttcctgttggcaaatcaggggtgggacggaggtaaatggagaggccctgcccagtctgctgtaatccaggatctcggacttagtggggccaaagcttccaagttctcctgattagtgaggctgcaaaaaatgtttggcatgttattctctcaccgtttaaatgtgggcaagtaacaacttacatgtaaaattacccccatataccaagcatttaagttatttattatatcattgcttacaatagcaaataattggaaattatttgagaaatggctaaagaaactcaggcccaggtacgcaagggaatcctaggcagccctcaaaagatgtcctgcaaacacctgatgtggaatcacaagatacacaacacaggtcagtgaacaaaacaagttgtggcatgatacccacagtgtgctgctgcttgtggaagcaggaacacatgtccatgtactcttgtactggcacagaaccctggagaattatcctgggaaccctgcatgctggctgcccctggggaggggaacccgagggttgggctcaagggtgggaggcaagactcactactttgcacaccttttgaattttgaatcatgtgaatgtgttatctgtgcagaaaaaataaaaatacatttaaagtaaagtgaaagtagacaagaaacctgaaacagagacggacaagcaagcctgcaggcccagccagctaccgcccccgggcaacctcatgccacactgtgggctctgcccagcttggttttgtggctccaccctctacggtcatatttgggtttccacacacacagcacccaaaggaaatcccagctaacgcacatcaggttctgggctgggccacccgccaaggtggttggtgggcatgacaccgccccgggaatggcgtcgtccaaatgcctgagcaatgacacggcctcagatggaatgatgccactgcccacagtctcacaggccctcccatctcgcctttgttctgcagcctccaggtgggtgtatggacactccaaaacagccatccctgtcaatgaatcagcctgcagggactgaattcattccttcattcatcaatatccattgagcacctactgtgtgccaaacactcttctaggaactgaagatgcaacagaaaacaaaacagataaaaatccctgccctcgaggagctgacattccagaggggacacagacaatacttgccagagtgaaaatgctaaggagaaaaatgaagcagggaaggatggggaactagagattttttttcctttttttattgaggttgaattgataaacaataaaattggcccattttaggtgtacagttggatgcattttgacagttgtatggcactacagacaagtgctagaattcctgtatcatcccaccatgttccttcacgccccccacagtcagcccctgactcccacccgctcccacccgaagaaactacagatcagttttctttcactgtagatcagctttgtctttcccagagttcatgcaaatggaatctggcttctctcagtcagcatcatggacttggttgagattcgcccgtgttgctgagtgtatctgtagcttgttcctttttactgacgagtagtattccacagtgtggatgcactgtattttgtttattcatccaacttgttgacggacatacaggttgttcccatttcttggctattacaaataaagctactataaacatttgtgaacaactctttgtgtggatgcatattttcatttctcttgggtaactaccacggagtggaattgctggacctcgtggtaagggtagctttattagaagcagatctcatgcttttaaacaggatggtcagataaggtgtcaccggctcggtgatatttcaggagaggccagaaggaggtaaggggtgtctgcagggaagagtgttctgggctgaggaaacagagtcagtatgtgcctggagtgtttgaggaacagcatggaggccatcaaggagggagtgaaggacgtgaggggagagggctaggaggtgtgctccatgtggaatgaggctagatggtatagggtcacatacatcatggtgaggacattggtatttttttcttttgacatggagtctcgctctgtcacccaggctggagtgcagtgacacaatctcggctcactgcaacctccgcctcctgcattaaagtaattccccggcttagcctcccaagtagctgggactacaggcacgtgcccccacgcccattttatatttttgtagagatggggttttgccatgttgtccaggctggtctcaaatgcctgacgtcaggtgatccgcccacctcagcctcctgaagtgttgggattacaggtgagagccactgcacctggctgaggacattggtttttcctctgagaacccgtgggaggaatctgagcagaggtgggacaggatcagacttgcattttaacaccttcccccatctccagctaccaagtggagaatgggctgcagggctgcagggaggaggctactgtaatagtcctggcaggagatgaaggagttggactggggtggaggcggtgggggctgaggggtgtgggattctggatctttctggatctaccccgaatgtggagccaacaggggatgtattggacgtgggatgtggggaaagtagggacatgaaagaaggctaggacccaaggtgacctctaggaactgagagtggccctccagctcccagctggcaaggaaacatgcatctcagaccggcaaccacaagaagttgaactgtgctgacaaccaaaggaacttagagtggaccctgagccgcacaaaggatcacagcctagctgacacggtgatttcagcctggtgagacctaagcagagaagccaatcatttcatgccaggacttctgacctgcagaaactgtaagaaaataaatgggtgctaagtcactaagtttgtgataatttgttatgtagcaatagatgactgatacgggcatactagaatcctacagtgtgagagctaaaagagtgcttagcaaccactaagcccaccccccccatgtacatatggggaaactgaggctcagagagcacagaggacttgaggcgtggttcctgaagggaggcgacatcaggcagaaactgtcccagctctggaggtgtcgcgagtcccagcctctcctctcttaggaggctgtagtacctgcccctctgccaacccctgctcatcaggactcccagagagccagctcctggctacccactatctaccctcggctccccaagcagcgagttcaggcaggctccccactggtgcaggccctcacccccacagcagagcatgggccaagggtgcacgagccaggcctgaatctgagaccccagggaagagaggaaaaatcacaaccttgggcctggctagaatcccaactctgccactcaccagctatgtgaccctggttgagggactcccctttgctgagctgcagtgtccacatgtataagatgggagtagggatgctttcctccaatggtcaatgagctaatgaaggtgaaactcttggcgggagcactgtaaatgcatgtatccaacctcttcctctgcatgggcctcagcttccccatctgctaaagggtcttgtgttcttgatgtgtttgggggggcccttgcagctctaactatatgaggattcaaattccggctctgcttctcactagctgtgtgaccttgaatatgttactcaagctctctgagtcccagttttctcacccataaaacggggctattaataatacctcctattacaggagagatgcaggtcagatacctagtagagtgactgagaaaatgttagctagttgtgttatcatcatgatcaccatttctagtgtgtgagtttggttgtgcctgctggaaggggcaacagggccgagcctcccagggtgagaaagtttggttttcttagagacagacgtttgtaggctgagcaaggcatgcgtgcatttctgggaaaacaaaattagttcatttccctccaaatccctgcctgtgcaaccacctaaagccaggctctgagtatcacagtgcttataagtggtaaacccacaggcaggtttgtgaaaatgaaaatatgcatttatttctgttcccagttctgagaactacttcctgtttccctctagaggaaggcaatggcttgtgcacatgcctggaggtgggaatgtgtgtcatggacacaaactggggtggttatcactgtgatgttcccactggccatgtctgaattgtgcacgcaatcctctgaccatagctgattcactggtgttaacagacacctgacggcaggctgggcactcaacagtctctattggaaatttgaaacttgaatggggcacacagacagagagtggctggagatgcatcattcctggccagcaccctagagaggaaagccacaggccctgcccctgagctccccagagatgccttttcctgttcttcccacaagagtactcgttttgggggtttgctcttccctcatcctggaaatgcctttcaataaatccactgctgggctccttggttagtcagtttttcggtgtttgccacccagttcaccttggccaatgtggtgactagggagacagcactgctgggggttaaggggagactgtgcaatggagcagtggccctctgtggagtagttctgggcagaaagagcactggacccagagtctggttcttcatgatgtactgccatgtgaccttgggcaaatcacttaacttctctgtctgggatggaaccagggggcaccttagtaagcagatggggacactaaggatcagagagaggaaaggctttacttaaagccacacaacaggtttaggacagacccgggagagctgggccctgcaaatcccagccctcagagggaaaatttcctgggttaggaagcttatttctaattatcaccaggacctgtttaccccaggtgaacagggtccccaggcacttggcagatcacagatttctttcccaaccaattgtcacatttggccttggcaacagcatcaatggcccaggagggggctgagtaaactgagcccagagagggacagagtcttgtgcagggtcataccacaagttcatggcagaactagagtctgggccagatctaaaaaagtgttgctttttgctctaaatttaaggagggtgaattgggggtagtggctaatgagttctccagaggaatttttaaactgtttgctttcattttgatgataatcctaaacatgtaactcaagcatatcatgaatcatctgcagagccacaggtaagtcctgcctgagcttgcgtttggacttgggatcacactggcagcaaataatagcatttgttgagaactaactatggcccaggcactacgctttgcattttttatctattttttaaaattttatttaatcctcacaacaaccctataagataaatgccatcagcatccccatttcacagatcaggcagtcaaggtgcagagaggttaaggttaagtaacttgaagcaatgttaacagcgagcctgtgatcttgcccactacactttaccattgtaatcggaggagaaaatggcagaggtggctttgatatgtaaagatgaattcctgctaagtgaaggccagtgatgcagaagtacagggtggggagaaatttcaccatgggtgaaatggtgccaaatggtgggagaacaaagccatcatcagcatgcagagttgggtggaagtgcgtgacaaacccaaacaaaatggcatcgcaattgagtgtcccacattcacactgctggtggcaactctggtttagcaaagcaacatcaaccatatcattaattaattaatattgttgcattgatgatatggcagcatagcttaatgcttagggatgcaggcttaaaactcataatttctgacttcaaatgtgttttcctcttggcctagtcctcagactatgggcaaatcactcaacctctctaagcctcagttttgttcatctttaaaatggaattgtaatagcacctgatagactgctgattgcctatgcaattcccttcttttcctgttttttgttgaccaaaccctgattttattcccgatggtgatatatctagctaagtaagactttattcccagcctctcttacagctactggtggccagcgagtggaagttattcagtgagagacttctgaggactatccctagagggggccaatgcatctgggaggaaagcccatatactcttctttctccttcttcctatatggaactcaggcattatggcagcagccccagcagccatctaggatcaagaagtgaccttcaggatgaagacacatgataaggatgaagcaacatgaggctggaaggaacctgaaacattgatgataccatagagactgcagcagccctgggctgactcttccctgacttttttttttttttttttttttttttaagtcagccttttattttaggacaattttagatgtaagaatcattgcaaagatagtacagagagtgcctgcataccccacacccagtttctcctattattaacatcttataggccaggcgaggtggcttacacctgtaatcccagcactttgggagtccaaggtaggaggatcacttaaggccaagagtttgagaccagcctgggcaacagagcaaggccctcttcctacaaaaataaaaataaaaaattgagctgggtgtcatggcataccagtagtcctagttactcaggaggctgaggtggaaggattacttgagcccaggagtttggggcttcagtgagctatgatcacaccactgtactccagtgtgggtgacagagcaagaccctgtctgtaaaaaaacccgaaaaccaaaaccagaaaatcttatattagggtatgatacatattaaaaccaaaaaatcttatattagggcatggtacatatgtcacaatgaatgagccatactgtcattattaactgaaaagcccatacttcattcagatttcctcagtttctccctaataccccttttctgttccaggatcccatccaggctcccacattacatttagttgtgtctccttaggctccacctggttgtgacggtttcaaagactttccttgtttttgatgaacctcatagttttgaggacaactggtcaggtattttgtaacatgttcctcaatagggatttttctggtgattttcttgtgattagacaggggtgatgtgtttagggaggaagaccgcagaggtgaagtgtcaatgtcatcgcttcagatggggggacattctatcaatacgacttctcactgtggatgttgaccttgattgctggcacgtttctccactgcaaaatcactgtttctgtcctccattcaacgccatactctttggaagaaagtcactccatgcagcccgtgcttaaggagtgggagttatgttccacctcctggagggtgacgcacttaagctacttaagctaataagtattttttatgtagcaaaagctaacagataaacaaacccttttgtttcgtagatctatgttatttgggttttctattacatgcagtcaaacccaattttaaatggatgcagaatttatttctcagggaggttgtgataattgaatcagagaggcagggacagtacctacagcagtgtttgggtgaataaacagtaacaataatcatcgttggccaggtgtggtggctcatgcctataatcccagccctttgggaggccaaagccagtggactacttgagcccaggagtttgagaccagcctgggcaacttggcaaaaccctgtctctacaaaaaatacaaaagttacctgggcatggtggcacatgtctctagtcccagctacttgggaggctgaggtgggaggatctattgagcctggaaggcagaggttacagtgagctatgattgcatcactgcactccagcctgggtgacagagtgagaatctgtctcaaaaaaaaaaatcatgattattaataacttaattataaataataataattattattagttttatagtgcattagtatttgattgataattttgtttcagtctttttagttgtttgggaactataagcctaaggagttgatagctcacttcatgaatgcacacaaataagtagtttaccgtcaatgccctcctaagggcctaagatcaacaggaatgcacctgtagttaaacaagtggttctattactcactgggacaagaaagtgcacagcatggggaaccttggaatgtcttagtgagagtgttagaaaaggcttattataggattggtctcgtgttaggtgacttgaatagggtttgaggatgtggggtttttcttcagattggatgctctcaggaagtgagggtaattatgcagttgcgatcttaacaagtcttgtctatagagaaggcagactctggcaaggctaatgctgtcattgggaaagaagcagcggtcacttgtattagctgggactgaggggtgtttggtcattttcgtggcttggaaatgtgcatgatttgtctttgttcagacatgattacagagtgttccacttttcgtcttgattcatcaatcactgaggacctcatctgatgttggtgttctggggaatcattaacattggacaggacataagctgttctctgtgcatgttgggctgacttgcagcaacacccagtcctagctgatgactatccaggatggcccctggatgtcagggctgctttcctctttctcaatttcagtcaacattagtgggtctgagaggatcccttcctccttttaaagctctccatatattaagttggagcaacaagctcattcctgctcaaactgggcaggcatttttagattcttttctgctcccagaagttttcctttcccattatttggtcttgagctggtctcaggaagaagtaatgaaggtgagagatctgcagtgggatcctgggaaaggtggcacatgtggatcactgaggcctgggctcggatggtgaggatttgaagattcccaaaggccacacctaagggtcaccagagggtgtccagcccccattatccagatgggggaactgagacccaggagggaagggctctgtgttgggtcccaaggtgtgccattccaattatcaactgccctcccttacctgactggcagagtccctttcttccagtttgacggaaaatactgtttggctctttttttgtgggatggagtgtagaaattggggaaaagaagaaaatataaaatcttacattaagcatcctaagccaattcatgtggtcgaagaagcagaaaagcagcagaaaagcagcagaatgcgatgccaaacacatcctctgtaggcacgtgtgttataccaggttgctgcgagggcccagaggacacatctgttgtagctgaataagttccagtgttgaacctcagcacacacatgcgcatctgggcacctgtgcacagagcttgtatgcacagagcaggaacacatgcatgctacaaaaggatcaagagtcaaactccaaactggctgcccttattgataacttccagctgatggaaggtggaaaggcgaaggtagatgtgttttggatataaaaggtctgtcttctctgtttactgtctatgtgaccttgagcaaattgattgacctctctaagactcagttttctgcaatataatatggttctcttctctcagagtaaggatggagttcagtgaggaaacagaaatgtaagcattgcatcattcggaatgctctgggctgcaagtaacagaacaccaactccactggcttaaatgaaaaagaaattgatcatctagagacaggactcaggacctcaatgatgtcagtaaagctccaggccccttctgaccctccactcaaccactcactctcccacctccctgtcagattggtcccaaatgtggttctcctggtggtccacactggagtagcatccatgctgtgtagtgtcttctccatcaacagaagagagaatctttgtttttcttttctttcttctttcttttttttttagacagagtcttgctctgtcttctaggctggagtgcagtggtgcgatctcagctcactataacctctgcctcctgtattcaagcaattcttgtgcttcagtctcccaagtagctgggattatgggtgcctgccaccactcctggctgatttttgtatttttagtagagacagggtttcatcgtgttgaccaggctggtctcaaactcctgacctcaggtgatccacccgcctcagcctcccaaagtgctgagattacaggcatgagccaccacgcccagccagcagaagaggtaacttttctgtatccctgaaacgctaagtcttcctctttagtatgagtgaactaattgaagtcacatgaccagccctggcagtaggaaccatggccaggggaatatcatgtgctgactggctgcagttttggtccctgaacacatcagtggctgggggaccccttcagactaaaggacctagccctgcagctggggactgatattaggaagggaaagggaaagggcatgattcatgtccctcactgctcagggtcttgctgtgtagcatctcttctgagatgtgggtcagacagggtgttggccatcgctagaaaggacccctcctacaaggacaagacttgaacagggatcctgaagacttctggggtttctatctagagtccaaatgggtctctagagtcagcctgttgacaggctgagttgagtggcagcatctctagtggatctggctctctgcctgtgaccacttgtgtgcatgagcaagtgcctcacagacctgcatgtgtacatggaagatgtatttttacctccatgtttgcgtctgtagcaacaagtatgaaatgcacatacatgttcatgcacatgtcaatgtacgtggctaccacacagtaggtatactgtacagtgtaaccatacagtgtttcaaatatgcatatatgttcatatatgtgcatatatgcaatatctggatagatgtatatggcataatggcatatttatatattaataaatcaatcattttagagtattaactatatatgagttatattatgcctaagatatattaataaaaacaatgtttgtcaagtacttgctatatgccaggtactattctaagcacatatgttctaaattaatatatgtattactttaaggatacataacctagtgtctttttggggtccatggatgaagtgtatcttcactcacctttaattaaattcggttgtttcattcttcatttgtgaatgtagggcattcacaaattcacaaattcattctttcaattgtgaatgtagggcacaagccacagtagtgtcaggagtgcctggaactttgtcaccattagaaatcatagctatttttgtatcttgttataatgattatagatatctcaaaatattaacagtcatcatttgttttgacctaccactgatcttgttatttaatgtattagcaaagaagcatatatagtacaatatcaaaactgtgttctttaaaaaaaaaaaaagtatatatatatatatgtatatgtgtgtgtgtgtgtgtgtgtgtgtgtgtgtgtgtgtgtgtgtgtgatgaagtcttgctatgttgcccaaggtggccttgaccccctgggctcaagtgatcctctcacttcagcctcccaagtaactgggacccagcttaaaatattttgatgacagtatatatatattttttgagacagagtctcgctctgtcacccaggctggagtgcagtggcacaatctcagttcactgcaagctctgcctcctgggttcatgccattctcctgcctcagcctcccgagtagctgggactacagttgcccgccaccatgcctggctaacctttttttgtatttttactagagacggggtttcaccgtgttagccaggatggtctcgatctcctgacctcgtgatccgcccgcctcggtctcctaaattgctgggattataggcgtgagccaccgcgcccggccaatgactgtgtttttaatataatttgtttcattcataatccaatgcatttaattttattttaagcatgtgaagacaccattctgaggaggggtccatggcttcaccagatgccaaagacgcccatgccacagcaaagaaaaattcattgatcaatccttcaatgaccccatgaagcagcagtgttaccagtttgctacagaggggaacctgaggcacagggaggttgtgcaacttgtttaaggtcacatagatatcgagtggttgtgcattattatatctgtcagttgtttttatagcctatgggctgatgtgggcttgtcctttgtgtcacatcagaaagcaagtctggtcaattattttctttctcaaggttaagtgagatcaagaaaaataatacacatatattgcatggattatttgtggtcatcatttgctaatccttatacctgtgccatgttggattaattattacagctttgtgagctgctttattaaggaggggaagtagagtgaacaaatcatggcaagtcacttcacctcatcttctcatttaaggatgctgatactggtgttgccaaggcgacgctgtcagctttcggaagcatctttaaatgggagaggcgaaggcccacacagatcgaggcggaggaaaactcagaaaaaaggctcaaatccctcggccgcagagacaaaccatcctggtggggaccatccctcaccccccgcacatggccactttctacctcacctgtggtggttgtctctggggtgtactcagggaactctctccccagtgtggaaactgcctttgctgggaacaacgcagagatctcagaaatgatggatccatcaagtgccagtgggagagactgagtggtcttggaggcctttccaggaagttcctcctgcccttggtacacgagtttggtggtagatgcccagatgcccagagtgctctgggagaggaaggcagctcacaaatgcaaatgcgctggaggtggtgcttggctgtgctgccttggatgagaccctttccctctctgagccctaatttcttttttctttttctttttcttttttttttttttttttgagacagagtctggttctatcgcccaggctggagtgcagtgacaagatgtcggctcagtgcaacctccgcctcccggttcaagcaattcttctgcctcaggctcctgaggagctggggctacaggcatgtgtcaccatgcccagctagtttttgtatctttagtagagatggggtttcaccatgttgcccagggtggtcttgaacttctgagctcaggcaacccaccagccttggcctcccaaagtgctaggattacagactaggagccactgtgcccggtgcctaatttcttcatcactgaaatgggaagaaaactaacctggtgcagggagaggtgacaagtgttttccataggaacccgcagatgcaggtatcctagaggctggcacctatgagctgtggcccccaggagacccagtctaggctcgagaccacaccagccgtgccctctacagtgccttgtgctgcccaggatcctcaggttggtcttgtctgcagccattgtgagtcagcctcactgtcagaagggctttcagaggttgctaggtgctctgtccatgggaaactgaggttcagagagggccaggggctctgatccaatggcagagccagactgataacagggtctaatattcctgggcaggacacagctgtgcccttgatagtcagaggcaatctgggatgaactggatcctggggtcaggacctggggacagggaggccgagagagggcacagaggtggagagaagagagatgagagccagggacagggaacgagggaaggctgcctagcatccctgtttcctgaagtcatgacttgggtgtcactgaccccactgctggtgccaggcatgatcatgagaccgaggtctggtcaagcagagtaagagtgataagcatagggatggacacaagaccaatcctggctgcagaaaatcattcctttactggaatcatggagacgagggagctccccgggtcagggatgctgagctgggaggacatgagcctggggctgccagagccttcttgtgaggaaagatcctggctgagaatgaagtcaacggggcagatggaggggctgagaggtggagctgacatcatttgagcctctggatctaacctcacttgcctttacccttagactttccagttatgtgagtcaatttattccttagggctagaatttctatcccttatacctgagtcctggcatggaagaggaaggaaggtaagaaagaaggatgaatatttaagaacaggtgtctgaggctgggtatggtggctcatgcctgtaatcccagcactttgggaggctgaggcaggtggatcacatgaggccaggagtttgagaccagcctggccaacatggtgaaaacccgtttctactaaaaatacaaaagttttccgggcgtggtggtaggcgtctgtaatcccattactcaggaggctgaggtaggagaatcacttgaaccaggaggcagagattgcagtgatctgagatcatgccactgcactccagcctgggtgacagagtgagactctgtctcaaaaaaataaaataaaattacataaagaacaggtgtctgaggataactcaaatcagcttcctgcccccttataaaatgggagtagagagggacttgggccttcaacccacccagaggagttctgtccctgggcctcacagctttgccctgtctcctctctagcttgcagtcagcctagaaactacaatagaaaaataaatgatgtggatacaaaaataaaatgccttttcctcacctgagtgcaggagaaggggcggcatgtgctggggaatgccttcctcaccccattctcctctttgaggacaaacatttattaggcacctgcttcatgccaggctctattaagaagatgacatacatggtctcatttcctccttgccatagcccagccaggaaggaatattatcatctccattttacagatgggaaaactgaggctttgatgatgtgaagataactggtgccttgagaggctgagccactggaccaaagtgtcagagctggagcaggtttgtccgactccaaagccctgcccaccacaccacactgcacacagtagaggctaaataaaggtctgctgggcaaatgctgcttaaggcgatttgagctctctgggcagcaatctgcccctaaagatttcccatcatgcctgaaatgccaccattagcaaccatgtcctttgagtcttgaaggggaagagtgctaattcccaggaatgagatcaaagtcagtctgtgctgggtttactcagggatcggctgagagtgggactcagggctggggcgagccagggggatgaaggggtcccattcccattggctcagtctcatccaggagaaaaccttctgaggacagaggtgtatcctggcggtagggcaggtgggctcctggctatgcctgggtgttggctgatgacaacagggcagacagcatgacacagtgatgggggcaggtgacagagtagctgtggatcctttctgactccatcctctgaaagaagctatgagggccctggtctcccaaactcaggcagaggccttatctcctcccctgcagctccccacctaccaccacagaggcagcatcactgctggatggggaagggagggaggctaggggttagggcttggaggcagagaggatctggacttggagacagatgtcctgcctaacagtccctgtaattgagcctgggggagttgaggttacagggagtcctaagggaagccacccaggtagagatcagcttcctgggacttgaaggagccttggaggacatgagcctataacacagacagggacctagttctagacccttcttcagggatggtatctgttttaactgaaaggttatttccagttgtttttagaggttgtttgaggctgtcactgtggcccttgtagccaaaaagggtgagtatagctggggtggggatggggtcgtagggctcctccttatgccaggggagcactagctttgtccaagagcatctacagtcctgtgagatgctctgggacaaaccgagcccattttcaaataagtaaatttggagaaagctgcccactctagccccttcatgggtagtcacaaggcacttggccatattaaaggctctgatcagtcctgcagtgaagagtgcctgttcactttgacttaacctgctgtttccttttctcattgctcataggtacttttagagacaagccatagttattccctgtgacacatcctctaggacatgctggaggtgaaggagcatgtccttttgggtctcctaaagaccctgagctccaaacattggagcctagaagtggtgaagtggtaaagcctagaagtggtgaagtctaaagaccctgagatctagggtcattagaacctagaagtggtgaagtgtgaaggggaaataatgattaacccacccactaaggggtggatgcagccccttcagacttgaaaagaaagttcaaggacatctcaagactagaaaatcttggaacaggagcttagaatgggagatggccttcttgccaatccaagggagagaacctgggccatctgggcagcttccgatgtgcaaatacattcccacctgcctgcaaccccaccattggtcatgggaatcaagtttggtctgttctcagcccattcaaggtactgtgaccctcaggcagggagcccctgaagggggagggagagaagaggggcgaggactacatcagagggatgggccccgaacaccctccatgtcacagacggaggggagttggggggcagatgacccttctggacttctgggtcaaggagggctggctcaggaagcccagggtgtcagggaaggcggtggcacagtgtcttgcatctgggtccaggttgtccaggagtgccaagtccgagcttctcctgtgtggtccagcctctggcacagctgctcgttagatgtccaaaggccgtatcatcatgcgagaggcacgcagtgagtagctggggcccttgaagtagtgccagcggatgccgtccatcttgtacttgttgtcgggagcgtggtagtagacgccgttgaggtttgacaggccacaggcgtcaaaccaccaccctggtggaagagggaggacaggcgcttggtggaggtgggagcccagccagtggcaagagggcagcccctgtgtcccaaagagaacaaagactaatcggggctgttgcctcctctgggaagccagctggctggggatggggctgggtgggagtgggggtggggtggacaacagaccctctgctcagccggggcctctagagggcagcaaggggctctggccactcctcgagcccccttgctcctcccggccttctccctgagcccttggcgtccctgtcttcctccctcactgaacctgtctttccagctccccaacctcccctcatcgctctgctcactgctttctagtggtctctgtcactctctctgagtctctcactctccaggttcatctctttctctcttatggtctctgtgcgtgggtctgtctctgtgtgtcccattgtgttcatctttctctgatggtctttgtccctctctgcctttcgtgtctctggccctcccttcctctgggcccccatctttcacatgctgtgtttgtctcccggcctctccttgggctaagtctttctcccccatctccctctgtacttctctgccccagtatagctctccatctgctgctcaatgactctgacagccttggtgtctctctctttctccatctgtcctctgtgtctcagaaggtctctccccctgtctctgttcttcttactttgtctctgtctcccattcaccccacttcctgttctctgacctctgtgcctaccaaggaacactgcctgagccacagctggtgtggagctgcccctctgcctccctctggtctcctgatcctggttcggcttgcctggggttgggactgatagggtatagggtgcctcccccccggggccctgcactcagtgtttctttagccttgtctctgaggaaaactggtggtgccagctttaggaggaggtgagacctggaggggacttcaaggactcaatgggggaaggcaccgaaggggcacagccaggtgagcttatgggtgggcaaggcccagacctgcacccatcctcctgacagcacctgggcgcacaagaacctggggagggaatgggagtgtcaatctgggtgagcctgtgggtgggcggagcttcaccccaccctgcacctacctccagacatcacttgggcacacttgcagagacagtggtcgttgtctgagtcaagggtgctaaagctggtgttctgcaggaccaggctgctctggcgccctgctgagccgctgtacccgaccacagaaagcctggaggccacccagaggtggtggtggcagaagggcccagagtcaggttggggctgtgtcgagcaagaacttccccagtggctttgtcccaggctgggcttcccctccaggtgttcttggagggacagccccagcctgggtggagtgcttgggctgtttcccttcctggattgccttccctgcctgctgcctcccagggacaaagcacttactgtatgccaggcctcccctatctcactgaacctgagtcttggagagaagtgataatggtcacaataatgataataatggctaatacatatacatttttttctttagagacagcaacttgctctgttgccaggctggagtgcagtggcacaatcacggctcattacaaccttgacctcttgggctcaagcaatcctcccacctcagtctcctgagtaaatgggacaataggcacgggccaccatgcccagctaatgtttgtattttttgtaaaatacaaacatagggtctcactatgttgcccaggctggtcttgaacacctgagctcaagcagtctgcctgccttggcctcccaaagcactgggattacagatgtgagccaccgtgcccggcaacgtttctttttctttcttttttttctattctttgcatctactatgtgttcaaagtgctttgcataggttaactcattctcctttaatcctcacaacaccctatttccattttacacatgcgaaaacagaaatcccaagagccaaagaaacctgctcaagtctcagaatgaatgagggtcagagccacatgccagcctagtgtggcctgacttgggagtctacgtgcattttgttccccagctgatgatgatctggcaaccccagccccatcgcacctcctcacattcacccacctcttccaagaagccttccctgactacaccagcccccatggatctgggctccagggcaccccagctctgcagcttcgacatctgctgccagccaggtgaggatttctatttctttgccaggctctgtggccttggtgggcatgtccaagcctgcctggtgatgaagaccatgagatctgggggcagaaagcctggattcaaattccagctctaccacttagagctgcatggccttggaggattggctcaccccactgagcctcagtttcttcatctgttccagtggtaatgatagtgaaattagcagtgctgccctcgtttattattgatttggtgatgtcagtgtgtgaagtgtgcagagcagtgtcacggggtgagtgctcaacattcagtgcttgttattatttggcccttggcagatggctgggcctggttggagagaatgcggggtgtttgtatggcagggttgggggaggctgcactggcagctgaagtagggagccaatttgggagcaattaagaaggtcctgctgaggctgggtagggtggctcacgcctgtaatccccgcactttgggaggctgaggcaggctgattgcttgagcccaggagttcgagatcagcctgggcaacatagggaaaccctgtttctataaaaaatacaaaaattagctgggcatggtggtgcatgcctgtaattccagctacttgggaggctgaggtgggaaggtcactggtcactggagcctgggaggtctgggaggtcagggctgcagtgagctgtgatcatgccactgcactccagcctgggcaacagagtaagccctgtctcaaaaaaaaaaaaaaaaaaaaagaaggtcttgctgggtggaggcaagtgggtggcagatgtggccagggcagctcaaggaagctcttgtaccctcagggcagggcctgagaaattccccagtgggaattcagagggaatacagagcctgggtatatggttggctcagtccccacacctccagtcatagattgtgtctgtcgccagggaaatgagacttaattattctctgtgtagaaaagacttgggaggctccctcagcttccttttaggcacttactatgtctggggatgggaacagccgtgctcccagaaagcagtccagtcaagggtgtgaaaggctgccacgagacagtgatcgtaatattgtttgctgagcgtttactacatgccaggcactgtgttaatgcttcatgtgcagtatctcattcaggcctcatcacaccctttttgaggtaggtatgcctaaagcacccattctacagatgaaaccgtgaagggacttgctcagggtcactcagggaagtagggatggagtcgggatttaagcctttgctttagtggccagtggcttaaatgggactcagcatagtgttgtagctactcactggtcaggtgtgaggagtagggggacatccagggaatttttcattcagctctggaccttgcattatcaggttggtatggatcccataaggagggatgtcagaacctgggcaacatagggaaaccctgtttctataaaaaatacaaaaatcagctgggcatggtagtgcatgcctgtaatcccagctacttgggaggctgaggtgggaaggtcactggagcctgggaggtctgggaggtcaaggctacagtgagctgtgatcatgccactgcactccagcctgggcaacagagtgagaccctgcctcaaaaaagcctttgctttggtggccagtggcttaaatgggactcagctggaggaaacagtgggggcatatcactgagaagttcccagaagtggaatcaggcataaagttcaggaggacagagagtcattcagagattccttgtggggaagcgaccttcccaccagtggaggtattccagcacggctggatgatgattgcaactatggagggaatctatgaagaaccagatgacacgtgagattttttgcagccctgtgagtgtgaatcctggttcagagatagccaggacccaggcttatctaaaagatccttaaatttctctgagaggcaatatcatgttgtggagacatcatgagttttgacagcagggagatctgagttcaaattccagctcatttaacttgtaactttgggcaggatacttaaacttggcatctcagtttccatattactaaagtaggtacagtaatgcctacttcaaagtgttgtggggaagattaaatggaataatggtgcctggaacacagtaggtgctcaataaatgctagttccttttcccaaatataccaagaaccaggctgaggaaggggtgagaaaccttgatgatcttacaagatcgtcatgtttaagctcatcctgctattgaagaagcagaagctcagagaagccagactgacttgtccaagttcccaaagcaagctggagcaaggccacaatgagtgcaggaatttcaacttctggcccagggacccttccacccagccccagggcataggacaggctgggcaagtcacctccttttgcttctgggtctctgtaaaaaggctgacttggggtgactgaccttggaagaccccttcttgctcctcggatggcagcaccaatgacattctttccactccacccagtggctaggacatgctgagtgctaaccagccacctccagatcccatgacgtgcacccaaatgggggacagatggtaggaacaggagacacccagagactgaccgttggagcagactctgtagacactagcctggggaccccagcccgcccactagctgaagaccccagcccccacaacggcctgggccccgaacccacctgtatagctggttctcactgcccaggtggaaatgttcgtactgggcataggcctcgtggccttcccagtcttgcagctccacacgcagagagtaggctgcccttctggtgagctggtgcaccacttcattgcccagccagtgctccccagctgggtctccgaagccctatagggaggggagcgtggggtgagactcatgctgaggaggaggccatgtccctggctgaggagctgggctgggccaggctccagggctacttatacaaaaccactgtgcttaatgatcgagttcataagtacagtgtaggcaggactgggagtaggagccctccacctgctagagggaaaagactaaggcttttgtaagtgtaaaagcctgttaaaagttattgaaatcacattcctctgaagttcaagaacaggaaaaagtaatatttggtgactacctttggtggagtattgactgggagggggcacaaagtgggcttctggggtgctgggagtgttgtacatctagcactgaatggtggtcacgtggttaaatacatatctaaaggctcactgagccttacactttatttgtgcgcttagacacatgtacgttaaacctcaacaaaaattaaataaaatatttcaatcagctacataaatagtagagcaaactttgttcagtgacagcgcagccactgcaagatttcagcaacacagaaatgtaaaactgagagtgtggggaatgtcatgtcccaatgcccttggacagaacaagaattcagcaccaaggacaggggcacacccaaggcccgctccccaatttagtcacgatgcaatgcgggttagcctgatggttaatattcagggttcttttgtgtatttctgcacctggacaccctattcctccttgccattttaatggttgtttaaagcccaattagttcaaaacactcataacttaatttggtatttatttttaagtattccttaaatgaacagcaagcagacgcaaataatagaactgctgtatcactttgtgggtatctttttctatttctttggctttgaaaactttaagagcttttaagtattttaagtcagcttggcaaaaaatcctttattcaaaacctaattaaaaaattggaaaacaatcgggcttctcatctgataaaatacatgtgatctttgggcctgcaattcctcgttaatgaatctctcctgcagatatgatcatagacgtatgaaaagacaagaaacttcattaaagcaacgcagtcagggttgactggggggatttttattctgtctcctcctttgtattctttaaaaaattagaaatgtatatgtatttttttaaaaaaaattaaaacaaaaataaagctaaactttttttcttagaacatatgtcagaactttcagaaagaacattcaaattcaggtgatggggtcccataaagcagatgtgcactgtcagctttagatgagttgattttttctgggggaggaatgagggcaaagcagtccccttccaacagcccagccccagccccaggtttcagagcagaatggcccctccccaaggcagcagggctacctgtttgtaatccttccagttccgctgaaaattcacggtgccattctcacggcgctggatgagggtccacctgcctccactgctctgcaggtcacagaacacctggagggggtgggcaaggcacagctgggagcccttggaggtagccagaggccaggcctgtgctagcccaaatgtggctaagcagacagacccccacagagcaacaggtgagcctgggggtcctgggcatcagaaagatccaggcttaaattccccacccattgtcatcatttttctaaagtggtgggtaaggaatgacctctcagagccttcctctcatttgtaaaatggagattcataccttaacctctttgtgcctcagtctctcatctaccaactggggttgtgaaaattaaacgagatgagtcacgtaaagtgtttagaacagtgcctggcagtactaggtaaacggaagctcgacctctttttgttgaaaggagaggttagcaggtgtgtgagaagtgtaaaagacaacctggagacaaacagaggcattctccttagtatattaagagggggtgaaaggaaatagagcaatggtaatactagcaatttgagggccgaggagggaggatcgcttgagctcaggagtttcagaccagcctgggaaacacagggagactttgtccctacaaaatgtttaaaaatattagccaggccatggtggcatgtgtctgtggtcccagctacttgggaggctgaggcaggaggatcactcgagcccaggaggtcaaggctgcagtgagctgtgatcatgccattgcactccagcctgggcaccagagcaagaccctgtctcaaaaaaaaaaagggaattatgaagtaggaatctgctagttgtttcccttctaggcctggctctcagaccctccctcctgacatccgtgctcttctctgtcacccttcttatcggatgacttgaccttaaattttaggacaaccttgggagccactgattgaaaatggtggcacctctattagccctggtttctaatttcccacatggagcagaaccccaactcctgccttcaactggactatatgtaaactagaaagaaacgtctttgggctaaggccctggaattttgggggttgtttgtaatatcagctatcatcatcttaaccaacactgaactattttgtgctgttccagttaaagcacctctgaagtgatgctggttaaggatgcacttccaactttgggaacttctgcttatccccacaatctgatccctgactgctgggaagtcaaagccacccctacacctctggtatttcagatactggacaaagcctgatcccgatggggtgcggggtgtctgtttgggaagcccttggctcagcaccctctaacagccacagttcccagggagccccctaaccttcctgggcttcgttgcattggacacctggatggtgtagacaccactggcactggccccagagcgctggatctctgcacagtcctggaacacctgctcacctgccattatgaaggctgcaaagggacaacacaaaagtcagttggaggtgggcaaggaaagagagaaggggccaagtgggcatgcctgcctgctttgtgccaggttctgggttgggaggtgctggggacagggagatgagtcagacctgggaagatttcgtagaggaggtgacagtaagctggaacctgtgtaatgagcaggagttgcccagtggagaaggggaaggtgttccaggcggaagaaacagcatatgcaaaggccccaaggtaggaagggccctagtgtgtgcagaggacagggcatggggaggggaactaaggctgaggccaaggagaggaaatgactcacaccgtgagagaggagttgagaccagggaggctgcttgctgtatgatgcaactgagagggtagaacaaggctggcacagagaaggtggggaaggaaaaggagagacgaagctgagatttcagcagggccaagtcagccgtgagtgccaggctgcggagcccagattctctgggctgagaaagagcactctgtccagagtgtggaggggggcctggaggggatgagactcaaagctgggaggccagagaggaggctgctagagttttctgggagagagttactggggcctgaactccagtgaggcacttcccatttcacagaccaggaaactgaggcccaagagtgaggcaactggcccaagggcacacagccaggtaaggcagaaccttccttctttggagctcccttgggtgggaagctgtgggctccccttcatagcccacccttttggctgtatctccctgctgccctgggcatatgctcccttattctgtcctcccttgaagctgactgctggccttaaagggcccctgtttcttccctctggactacatgagatcgggatagtattaatgactaaaacctaccaggggtttctaggcctggcctggaaaaagtgactgttgacaaacaaagtgcagagatttaaaatctcctctgtctcaattagtggaatccagttagaggtttgaactatgattctaccagaatccaatctctctgggtagccaggtacccaggatggggctaaaattccagatggataggttgtcaacaccagtgaggaaccaggaggctaccacagggtgggacttcctggtttggctttacatctgaacttcagggatcccagatcctggatctggggcacttgtccagagaaggctattgctctcatgtcacaaatgagatgactaagacccccaaatcaattccagttcactcacaagcatttcctgggcagtggagacccctgccccacctgttggcaccccctcagctccccacagggaattggagtccagccaagcatgaggaggctgttggcctcaaggtgagcagggatgggctgaacctcacccagtaaggcaaggacagagccagggttggcctgagatttccagccaccctttccaaggctctgctcactgttattttccttagtctacaacaatatcaataacaataacaacaataatatcaacacaaaaagtgaaatactcaccatgtattgtagtgtttccaaggtgtcatgtaatgccaggggtagtttggggccaggaaaaatatttttgggaggcataagaataggatggactgatattgatatgcaacagtttgatctggtcctcctctgaatatctgggctggtaatttgtaccagtttccctcgcttttgtgcataggcactgtgctgaacccttttgtatgcatgaactcatccgattctctgtgcaagaactctatgagattattattcccgttttacaagtaagaaaaattgaggctctgagaagttaaataaatgacttgtatgaagttccagtgctaattaataagtgaaggagccagggcttgaactccggcccatctgactgcaaagccagtgcccttcctcctacacatcttcctttggatttccaccactgagcatatgtaaggttgggcaaacagcctgcatgaacaatcgctgcttttatatcatgcacaagtttggtcttttctgcctgtgcccatgtccttgtaaccttctgaaccaaactccccagtgcctgggaacatcagaagacttgactctcttctcctttcactagcctccacctgactgggacaaagccatgcagagagctagtgctcccttcctgctagacttcaaggatgcctggttcctgtgccccatctccatccagccctctcttctacacctggtgactgagcctctccttcagtttctccatccagaagggggtgaaagcaactgcctagtgtccttccctggtgatagtggagcacgggggacagggtgtttgggcaaaaggtgcccaaggtgaggtgcccaacacaacctcctactcagacgattgagcagacattcagcctcatctggggactgggttaccagtgggttagtgggaggcattgggcccaggccctgtgccttgggctgagctacaagaaacccacacatgggatgaattcaggcagctcaaggccaggtctgtgcatacgccagtaataggttcaggttaatccacatgtcgcgatttggaaggtgtctacttttcctacctgtagcttccttaggcctcaaacccctactcagctgggtctgccagactgagatggagccagggtggaatcttctgccctcaaatccctgtcagccctggtggtgccgggagcgccatcactattgggtcttaaaggctttccagccttccactatggatccaggagcagcagtagcccctttggtctttctctctcatcaggacatctccactcatggttccagtcagagcttcttgaaagtagtcccactctgttcaaaagcctcccatgccccctgctagcctcaggctaagagcccttctccttcgcacagcctttggacctgtctatttttatggtctggaaacttcaggaacactgatagctgagcatctggcacatattatgcactcaaaaaccatgtatttctttctccttccctttgggacccgtaaaccagggactggacatttttgcaagagacaggagctgtgactgtgcattcactgctgtatccccagcacccagcactgggcctgccacacagtaagtgcttagtaaatgtttgttgactgagtgattgcagctggggccaagaatgccttggacaccccaagtaggccgtgttagaaggagtcagtgagagcctgggagcccagcccagaattgttttcttgacccagaagccagggccagggatgcctcttcacttctgtttggccctcttgggcttaggggcaggggcattaagatgagagaggtccttggggtgcattgagtctaacctcccagttcctcccattctacagccaggaaaactgaggcccagggaggggtaggacaagcccaagaaagtggggctggagaatgaatcctggagaccaaacttgtcagtctggattgctgttgccctcatcctcgcctccaaaacccatgggtaaactgaggccaagagaggggcaggggcatgcccaaggtcacccatggaatcaggggacagggcctggattgggattgttgttgacgccattattactgtttattgttgtttctatttcacagatggtcggggagggtggggcccgcaatggctcccaggcgcccagagaccctggagggtgagcagggtctcccctcccctctcctgcccgtctttagccacactggggcgcacaccgctcactcacccggggccgaggcgttagccctttcttgcaccaggtgccgcaacaacaccagcagctggcgcaggctgtgctgctggtcctgcaggaggctggagttgtgcctgacaccgcgcaggccgcgctcgatgttggtgagggcggcgctctggcggctcagcgtgttcagcagcttcgccttcttgctgaggatgctggccagctcctcctgctgcttggtctccagggcctgcaaccgcttctcgagcgcgctgcggggtagggggcgcacagaggtgagcctggcatcctcgcgaagcacgcacccccgcgcgcctccccggccctggagtccctgcagcccgacgatgagactcaagtgtggtggaacgtcctgtgcccactgtaggcacagattgaggaggggagaaaagagatacccggccctggagtaatatagattgaggtttagtggaagaaagaggtggtgtgggagggacaccagcaactgggtagctattatcaaatcccaactgtgcttgctttttgacccagcagtctactctcaggagttatcctctagggagcatggtcaagaatggccctggggacttgcttgtaatagaaaaacaaactaaccaaccaaccaaaaaagatatagcctagatgcccaaaagccaggactggctgaatccgttgcgttttggcgtccctggaaatgttccgcagtcatgaaggaggaggcatttgcacagaattggaaagatgcccaggacttggggcacatcaagcctaaccccatgtgtggcaagagaagaaagaaagtattaatgtaaataaagagaaatggggtgaacatataggagaaggctggaaagaccgcagtggtgcctgtgtttgggaagaatatgaaagaaattccctcaagtgctgtgacttctgcagagcaggtttgagtggatgaagatggagaggaggaagatgggggcaggatggagggcccaactttcacttttattttgtacaggttcctgttgtccgatgatattataataatcaagagacattttttgtaatggatttagaagcaaagaggagtttttcaaaagaaagccttagactcagctctttctttttggacattttatcctccagatttactcacatgtgtgtgaaatgagatatggaaatgttactcatcgtatcactggttggattagtaaaaggctggaagcaacctcaatatccattaactggggactggaggaataaaagcagggaccacatatggtggagcattataaaggtggagaaaaaaatgagcaagcatgtcatgcagttatagaatctttccaaggtaactgaataataatttgtagaaacaaggtataaacaagtagtaggctacatttgggcttaaaaaggataaaaatgggaatgtacagatgctccaaaatgtatgatggggctatgtcctaataaagccatcgtaagttgaaaatgtcctaagtcaaaaactcatttaatacacctaacctgctgaacatcctagcttagcctagaccatcttaaacatgcttagaacacttacattagcctgtgattgggcacgatcatctagcacaaaacctattttataacaaaatgttgagtagcttatgtaaggtattgatattgtactgaaagagaaaaaccgaatggttgtatgggtactcaaagtacggtttctactgcatgtgtatcactttcataccactgttaagtcacaaaattgtaagcccaaccattgtaagttagcaatcttctgtatgtatgtgtttgcatattcataagaaaccctggaatgtcagcttataggatgtcagcttcacgaggacaggggcttttgtctctttgttcacttctgtatccacagtgtctacaatagtgcctgacacatgaaaagagtttgaaaaataattgttggttgaatgaatggaaggatacacaagaaactaggaacagtggctacctctggcttgggtgggtggctgagagacagggctgggagggagacattttactgtatatccacttgtgccaactcattctgcagactaagaaattgagtccagctagggcagaagaaatttcctctggactcccaattatgctgcaggaaaagagagaattggggcacactgaaattctagaattcctgccctgtcttcatgggccaagagtttaccgatgacatcctccatcctcactgatttctagacacctagtgttaatttagagtcattgaaagtgtcccagtccttgccactgagaccttgggttgggagaataagaagatgggcagattgtcattaattgcacccagattagagagagctgggggatcttatggccttatcctgaaccggcatgtgaacaacaacatcttgcctgattcacaggcctgtggcttgttcagtgggtagattttgccttctccagaaccctgactttggcagctttttttcttcactcagcttgaaactgaggtgaaatcagccttagctgccagatttttctgctttatctaaacctcatgaccgcttttttttttttttttttgtaatttaaagggtgttcccctgatgcccatttgcttataaatgcaaagactctctgatagtgtggacaagaacctggtaactgtggttgtttctgggaaaggaatcgtagatagcaccagatttatttatttgcaaagaagtaaagccaataaagtttaccggatgaatagtatggtgggtgaattagatctcaataaagctgttaaaatttacgagataaataaaagaaggaggaaggaaggaaggaaggaaggaaagggaaagaaagaatcagggtgtcctgggccccaggaagatgcctatcccctgtcccacccagtgcaggggccaggcaatgtgtttgcctggctcctagcccagccccgtatccactctcatttccagcctcagtctagactccaaccctggtttcagtccttccccagcaggggctattcccagctctagtttcagccctaactcccaggatacctccttgccccaatcctaatccaagctcctaggtctggctgcaggccctatcccagacaccagcccacgtccagcttccggtcctggctccagccccagtcctagccctggctctggtgcctgccctaggtcctaaacttgactccagccccagcccctgtcctagtctggtgccaggtgccacacccacctgttttggccctgaagctgctggagcttctgcctctgtagcagcagctggttctccagcttgttggtggacagaaaggtctctggcatctgggcatccattcttgatgtctggttcaggagctgccccagcaagcagaagcaggtagggggctgcgtaagcgctacaggagccctgcccaaccacccacctgcccacaggccctgccactccagaaacttacccatttccactctcccagtcgtagttcctgtggttactcactcacaggccctgacttaagcttattacctgcttcctaaatttgcctttctccatcactgcaatggcagctccattctccctgatgcttaggccccaggagctgtcaaccctgtcccccacatccaactcatctgcaggtcctgtcagccttgccttccaggtggcccctgaccacctctctcctgctctgtggccctcactctggccctggactgctccctcattgcttgcaatctattctctactcagtagcctggggctgcctcttaaaacatgtttgctctgttcaaaagcttcctgtggctcccatctcatgtagcggaaatgccccagttctcaccatggcctgcaaggccctatggtgtgatctgtccctatcacttctccagctccttgcctgccactctcctcctggtcactccagcatagtggtctcctgatgttcttgaacctgccagcacgtccatcctccctccgggcctttgcacatgctgcatcccttgtctggagcactctctgcagtaagcctggctgcagccctaccttctccatggcccttcctggccttgctgtatgagcttgcagctctcatccccccccaccactcccaatgcaccccctctcttgctctctcttccatgctattttctccttagcgctgtcactggctaacatatgcagacatgtgttgcttaatgacggaaagatgttgtaagaaagtcgtcatcatgcaatttcgtcattgtgcaaacatcatagtgtgtacttacacaaatctagatggtatagccgcctgcatacctaggctatatgagacagcctattgctcctaagctacaaatccatacagcatgtgactgcacccaatactgtaggcagttataacacagtgggaagtatttgtgtatgcatatctaaacacagaaaaggtacaataaaaacagcatacgatactcttatgggactgctgttgtctatgtggcaagttgttgactggaacattaagcagtgcataaccatatatgtcacttatcttttcattttcaggggaagcttcacaggagtaggaatgtatgcctgctttgtttcctgctgtatactagacaccagtcttctcaagcagtgcctggcacacgggggatcaaacaaacaaatgggcacaaacttgtgtctatttgttattcactttttcatccactgacttccctacccttcatttattcactagttccttccctgctctttgctgctcagatacctcttctctccaagtccttggccccagaggcccagtgaattgtttcttatccatcttcccctggcacattgtaagtcctctgagggcaagggagctgtgctactatacccctcattccagtgcccagcacagacccaggcactgaagttacagaggcagaaaagccaagcccagcatccaccccccagggctcatagcttggagagagatagttttatgacaagttcatcagggaggagggacccggggggctacaggcccagaggaggccttgaccctactcagggtcagagatcaaggtaagatgactggggctacgaaccagcctggccagccacaggccctcagtgcccactcagtcaccctctgttacctgagcctccatgtcggtcagcttgcggatctgggcagtggtctggttcaggaggctggtgcccagctctagcatgggggccgtctgattctgggccatttgctgctggacctgctccagcttcgacctcaagatcgtcttgatggccctctctagctgtgggagaccatgggctggggtcacgggggaggggcgggggaagccccctgtccctcccacgtgtcaccatgggagggcactgagcagccacttgaggcctccctggctcagaacatgccgggccaggtcaggccaccattacgtcttgcctggactatcccagtagatttttccctgggagggatttatatgcctgttttgtctgcctctctgcttccatctttgtcccctgcacagtccatcccccactaggcagccagagggatcctgctaaacctaagtcaagtcacactcctcctttgctcaaaatctttccagggttcctatctcacgcagaggaaaagccatgactgcaggttcctccgtgactgggcctgccaccacactctcattcctctcctattcccctctccctcactcacttcaatcccgatgcaatggctccatgacatccctctaacgaagcaagcatgtgcccacagctgttccctcactgttccctctggaatcctcccccaaccctgatccgcatctgcgtggcacacctcctcatgctgtttcagctttcttcataccacttatcaccacctgactttttaaaatcactatctctctttttatctgtctgttgtctgtttctctctctagaatgtcaattccatgaagccagggacttggttttgctcactgccttgtttctatgtttagcacaatgcatggtgcacagtgagtgctcataaatgcgcgttcaatgaattgatgaaaaaggggaaacagcaagggtcagagcacagcgcccaatcacatgccccttcaccagcttcctcagggtgagtcagccagcagggagtgggaatgcatctctcccttgtacaaagagtttgcaggtccattggccaagctgtgttttctatcttcagatcccctctatctgccaaatggggctggactggccagtctccaagggttctcccagctctgatgttctgggatcccacatgcaaatgttcatttctttgacagggctgctctctttcccaagggcaggagagctggtctggcatgacaccagtatgctgttgtaaaggtgaacagtgtgttctcagggctcggtgcctgcaggcagagagccagctcccctccaccattgcctctccattcggcacacatgctggcctctcaccatgccccccacccctgtccctggctccttcccttgccctctcactcagtctttcagaagccagctggacagctctcagggtccttgggaagatgggtgctccccaggagaggtggtgaccttggctcgggccaggctccagccacttcctccttcatctcttctcccttcttccatcttgactgttcactcccatcccttcctcaccctggagtgtttcaaagggagcaagttccattatcacatcctggagcgggtgcttgtgggcggtagtagtactggttagagctgtgtttctccaagtgtggttcttccgtcagcatcagctgagctcattaaaaatgtgaatttccaggtcccaccgcagacctcctgaaccagaaactcttaatggtgcccagccaactgtggttaacaacacccctggctgagtcagatgcctgctcaagtgtgagagcccttgatgcagagtagcagcagggactgaagaccagagagacccccctccttctttccctgcatcatcagcccaccccctccctgcagcacacaaacatgcgctaacagcttccatctaaaaactaactccacagcctctctggctgcttctccagtttctctgatctcatcaacacaaaacttctacaagttgtctccattttctcaccttcatacccaccctcacttaaaaaacaacaacaacaacataacgttaataataaaatgatgttacgtttcacacatacaaaaaagcatagaggccaggtgcggtggctcacacctataatcccagtactttggaaggctaaggagagtggatcatttgagcccaggagtttgagaccagcctgggcaacatggtgaaactccatctctactaaaaatacaaaaattagccagccatggtggcataagcctgtggtcttagctacccaggagactgaggcaggaggatcgctggagcctgggaggtggaggttgcggtgagctgagatgcaccactgcactccagcctgggtaacagagtgagaccgtgtctcaaaaaaaaaaaaaaagtatagagaataaatatagcccatagtgctcatcctcctgtatacctccagtcatgtctctccatcctgggaggtccctttgccttttggcgtctcactgttgcccaggctggagtgcagtgatgtgatcacggctcactgcagcctgaaactactggcttcaaacaatcctcccacctcccaaatagctgggacgacaggcgagcaccaccacgcgcagttccccccttcgctctttaattcaccttgtcatagatagccctccttgacactgccctcaagggacactccatcttgcttgacatctcaggagcaatcacctggatggccactccctgttgctggacgacttccccccaatcctggtttcctcctagcccctaaccacccactctctgactcctcctttacagactcctacacggcagggcccccatggcccagtcctgggtccttgtctctatgtacattcactctctaggtcaggggtccttaatgaagaagccacaggctccatgaacttgagtgagaaaaaaagatcacattttttgtccactaatctgcaattaaaatttggcatttccttcaattatgagcctaggtcacaaaccacagccatactagcaggtcctgagagtcattaccaatagaaatcccaaatattttcatatcacaacacactcttacggtatcttaaaacattgtttttactcaccgggactttggaattatagacatcacacccaccactggataatgctatgcctgatcacagattttatttttcatattttgcttatgatttccatattactgagtgttcttatgctttgattttatgcatttctgagaaaggattattaagcttcaccaggaccagatgccaagaggtctgaggatccaaatgcatcagggccctgccccaggggctgagatcggtctttggacttccacatccctctgtgctaatggagccatcaccatctcccacccagacttctcccctgcatgtccccaactcgccatctctgcatggtttccaatgagcatctcaagcccagtgtgaaactcttcattcctcagctcccatcgcccctgtccctgtaactcccaccccatgcttcgaaatctttcccatctcaggaaatggctccacccagttctgaagccccaaacccagacctcaatcttaacttctctttttcttagcggccacactcaacccactagtaagtactgcccactgtgatcccaatttggatttcaaatctgtttactcgccttattctgggccaggctgccctcctctccatgggtctgccttttgtgccttcctgtctttaacccctctgtcagctcccaggagattcttttttttttttgcagttgcaagatttaatagcatgaaatagagtgaaaacagagctcccatacaaagggaggggacccaaagggggttgctgttgctggctcgaatgcctgggtttatatgccaatccttgtctctcccactgtgctctcaggcaatagatgattggctatttctttacctcccatttttgcctaattagcattttagtgagctctctgattggttgggtgtgagctaagttgcaagccccgtgtttaaaggtggatgcggtcaccttcccagctaggcttagggattctaagttggcctaggaaatccagctagccctgtctctcagtccccctctcaacaggaaaacccaagtgctgttggggaggtcagctgatgaccgcactaactgcttcctgctgaattagggagtagtaggggtggtgcagttgagatttcctcgggaggggtgccttcgatgtcattaacatcagagcatgggctagcaggctggtccgggggtccgtggtaaatcttagtcatggactgcatgtgagctcccaggagattctaatgtgtggctggctgggcccaccagcatggatgaggacaaatatagctgtatcgagtttggtctcagactttttcatgcatcattgacctcctagaacctaaattaaaaagcagacatccaggtactgagcacctgctccaagtagtcaaacagcatattcatgcctgaggtgagactttcccaggcatcttccccaagcttctcatttgcctgaacatagacaaactgaggcccagaagtcttgcccaaggtcaccatctggcaggctaggctctaagactccttgcctgagggctgcagagctgagctggtgattcagggcagctcagggtcccctcaagtgactggagctccccaagcacctcactggtcccccacttgtcctgtggttgcaagtggctgggcagggcaaaggttacccacagctggatcccatcacccagtttgccacacccgcccaccagcacaggccctgggatggataatctgggccagatgggctcagttaggctgggctgggctctggagactaatattggcctgggtggtgggagctaggtctggcccatggctgaggcaccagctggaagggcagggaatggatcccagtggaggaactcacccagcgtgggatctacttctcttgtttttttggatctacttctctctatgccgtgcaccgactccaggattagacctgccccttctccatcactctcaggctgccgaattctcaggcctatgatggggtacaaaggcctgaccttttgtcacccttccagctggcaaagagactgagttttggtccctggtctactgccccatccccttggccctgggtttgagttctggctctgccacactttcattgtgggcccttggagactactgtgtttctctgagccccactttacagatctgggtcatgggtcagcacaccctgctccttgctggggagagggcatttgcaaagggtcttgaaggaaaagaaagaaattttcacaggcaggggctgggggagagggggtgattcagacaaataacaggtgcagatccgtggatgagcagcctccgtggccgaggagatctgctcaagcctgcttctctcctgcattatttatataaaatggacatcaattggtgaatggagaaactgcagtccatccatgcagtggactccattgagcaataaaaaggaaagaaccattgatgtgtgcaaacacacagatgaacctcagatggatcatgagtgaaaaatatgcaactccaatggttccatactgtaggagtctatttgtatgactctctaaaaatgtcagaatctgtgattgccagggcctgggtccggggagggggtggggattgattgttaaaggacacaggggagctttttgggatattggcaatgttctatgtcatgattttgctggtggttacataactgtatatgtctgtcaaaactcatggaactatatgtgaaaagggtagattttgctgtacgtgggtcatacctcagtaaaaaacaacgcccccaacacaaggttctataaaatgccgcagatatacatatgtaacattaaatagatctcctccagtgaaccccctcaccctctctgagtttcattcatgtgttcattcaggaattatttcttgagcacctactatgtgctcatcctgtattaggtattagataatcagaaatgagcaaaattcgtaaagtttctgattccagggcacttctactaaatatatcagttgcattgaaatcttgatgaatgctatgaagaaaataagacagggtaatatgtggggttggaggcaagtttagccagtatgatggagaaagccccaccagagagggccatctgggctgagaggctgagaagaagcaaggtctgggagagtcaggagggagggaattccaggcagaggaaaaggcaagtgcagaggccttgaagtgggagcgtgtctggtatttgaggatcaaaatgaagatggtaacaatgatatgccctgcagctatctctcttccatggaaaatggtgcatgaggttcctgtttgggaaatgcatcttgtcaactgcagataaaaatcaatgcagagagagtagtgctttgtatggatgaagctgtgtgtgaatcacagctcttagcttactggctgtgtgaccttaggctggggcctctactggtgtctgagccttttctctaaaatgaagataatcatagctccttcccctgggttgtagggagcattcctgagataactctggttgtagttacataatgaacgcatgataaattctggtatgtctgggccatatcttactatgtgtcaggactctgagcccaagcctgcgcgtatacatccagatggcctgatgcaactggagaaccacaaaagaagtgaaaatggctggttcctgccttaacggatgacattaccttgtgacattccttctcctggacaataagtctccgtagctccccaccaagcaccttgtgacccctgcccctgcccgccagagaacaaccccctttaactgtaattttccactacctacccaaatcctataaaactgcccaccccatctcctttttcagactcagtccacctgcacccaggtgattaaaaagctttattgctcacacaaagcctgtttggttcacatggacgtgcatgatatttggtgctgaagacccgggacaggaggactccttcaggagaccggtcccctgtccttgccctcattccatgaggagatccacctatgacctccgatcctcagatcaaacagcccaaggaacatctcaccaatttcaaattgagtaaacggtcttttcactctcttcttcagcctctctcactacccttcaatctccctgtccttccaattcgggttcctttttctctctagtagagacaaaggagacacattttatccatggacccaaaactgcagcaccggtcatggactcaggaagacagtcttcccttggtgtttaatcactgcagggatgcctgccctgatcattcacccacattccattggtgtctgatcaccggggggacacctgccttggtcattcacccacattcccttggtggcatgtcaattgcagggacacctgctttggctgctcacccatattacagcccagggctgctcaccgcccgcttctccgtgtctctagctttctctttaaacttacctcttcactgtggtcaaccttccaccctgcattcccccttcttctcccttagcctgtgttctcaagaacttaaaacctcttcaactcacacctgaactaaaacctaaatgccttattttcttctgcaatactgctaggccccagtacaaactcgacaattgttctaaatggccagaaaacagcacttttgatttctccatcttacaagacctggatgattttttgtcaaaaaatgggcaaatggtctgaggtgcctgatgtccaggcattctttcacacattggtccctccctagtctctgctcccaaagcgactcatcccaaatctttttttttctctcctgtctgtttccttccatctccaccccaagctctgagtcctttgaatccttcttttctacggactcatctgacctctcccctcctccctgacgctgctcctcgccaggctgagccaggtcccaattcttcctcagcatctgctcccctaccctataatccttctatcacctcccctgctcacacccagtctggcttacagtttcgttctgcaactagccctcctcacctgcccaaaaatttcctcttaaaaaggtggcttgagctgaaggcacagtcaaggttaatgctcctttttctttatctgacctctcccagatcagttagcatttaggctctttttcatcaaatataaaaacccagccccgttcatggcccacttagcagctaccattagatgcttcacagccctagacccagaggggccagaaggccaccttatccttaatatgtattttattacccaatctgctcccaacattagaaaaagctccaaaaatgagattccggccctcaaaccccacaacaggacttaatgaaccttgccttcaaggtgtacaataatagagaagaggcagccaagtggcaacatatttctgagttgcaattactcgcctctgctgtaagagaaaccccagccacatccagcacacaagaacttcaaaacgcctaagccgcagcagacagttgttcctccaggacctcctcccacaggatcttgcttcaagtgctggaaatctggccactgggccaagaaatgtccacagcctgggattcctcctaagccgtgtcccatctttgcgggaccccactggaaatccaactgtcccactcgcccaccaaccacacccagagcccctggaaatctggcccaaggctgtctgactgactccttcccagatcttctcttcttagctgctgaagactgacactgcctgattgcctcagaagcctcctggaccatcacagatgctttaggtaactcttacagtggagggtaagtctgtcccctttttaatcaatacagaggctacccactccacattacctacttttcaagggcctgtttcccttgcctccataactgttgcgggtattgacggccaggctgctagactccttaaaactccccagctttggtgccaactgggacaaaattttttttttttttgagatggagtctctctctattgcccaggctggagtgcagtggcgcgatctcggctcactgcaagctccatctcccaggttcatgccattctcctgcctcagcctcccgagtagctgggactacaggtgcctgccaccacgcctagctaatttttttgtattttttttttagtagagacggggtttcaccgtgttagccaggatattctcgatttcctgacctcgtgatttgcccgcctcggcctcccaaagtgctgggattacaggcatgaaccaccgcccccggcctgggacaacattcttttatgcactcttttttaattatccccacctgcccagtacccttattaggccaagacattttaacccggacaagtcttacaggctggtccaagatcttcgccttatcaaccaaattgtcttgcctatccaccctgtggtgccaaacccatatactctcctatcctcaatacgcccctccacaacccattaatctgttctggatctcaaagatgctttctttactattcctttgcatccttcatcccagcctctcttcggtttcacttggactgaccctgacacccatcagcctcagcaacttacctgggctgtactgccacaaggcttcagggacagcccctattacttcagtcaagccctttctcatgatttactttctttccatcactcccacctactctcccactgaaacttccacctatcaatctcttcccacacaaggcaaatggttcttggactaaggaaaattcctccttccagcctcacaggcccattccattctatcgtcctttcataacctcttctatgtgggttacaagccaccagcccacctcttaaaacctctcatttcctttaagacatttaccttgtatttcactccatccttggctaccttccccttgctcttcagactctcctcccaggccctcttcttgtttgcttatacccagccctgtaaataacagtgaatggttgcttgtagatactcgacgttttttcatgcaccatgaaaattgaacctcctcctctaggaagttaccccatcagtctccattacaacctctgacggctgccaccctagctggatccctaggagtctgggtacaagaaacctttagtactccttctcatctttttactttgcatttccagttttgcctcgcacaaggtctcttcttcctctgtggatcctctacctacatgtgtctacctgctaattggacaggcacatgcacacaagttttccttactcccaaaattcaatttgcaaatgagaccgaagagttccctgttcccctcatgacaccaacagttcactactattttgttttgtttttcttattattaatataaaaagacaggaataggccttgacttactcactgctgaaaaaggaggactctgaatatttccaaatgaagaaggttgttttcacctaaatcaatctggcctggtatatgacaacataaaaaaactcaaggacagagcccaaaaacttgccagtcaagcaaataattacactgaacccccttggacactctctaattggatgtcctaggtcctctcaattcttggtcctttaatacctgtttttctccttctcttattcggaccttgtgacttccatttagtttctcaattcacacaaaactgcatccaggccatcaccaatcattctatacgacaaatgctccttctaacaaccccacaatgtcaccctttaccccaaaatctttcttcagtttactctctcccactctaggttccgacattgctcctaatcctgctcgaagaagccctgagaaacatcacccattatctctccataccacctccaaaaattttcgccaccccaacacttcacctctattttgttttgtcccaacacttcaccactattttgttttgtttttcttattaatataagaagacaggaatgtcaggcctctgagcccaagcctgcacgtgtacatccagatggcctgatgcaactggagaaccacaaaagaagtgaaaatggctggttcctgccttaactgatgacattaccttgtgacattccttctcctggacaatgagtctcagaagctcccccactgagcaccttgtgacccctgcccctgcccacaagagaacaaccccctttaacgtaattttccattacctacccaaatcctataaaactgccccaccccatctccctttgctgactcctttttcggactcagtccacctgcactcaggtgattaaaaagctttattgctcacacaaagcctgtttggtggtctcttcacacggacgcacgtgacactatgtagctgttaaaaacaatgaggttgatggctgggcatggtggctcacacctgtaatcccatgactttgggaggccaaggtgggtggatcgcttaagctcaggatttggagaccagcctgggtaacatggtgaaaccttgtgtctactaaaatcagaacaaaattagctgaaggtggtggtgcatgcctctagtctcagctacttgcggggctgaggcaggaggatggctttagcctaggaggtggttgcagtgagctctgatcatgccactgctctccagcctgggcgacagagcaaaaccctatcttaaaacaaaacaaacaaacaagcaagaatgaggttgagctacatcagatgctgatctgaaaagatgtccctgtcatgcttatgagtaaaaaaagaaaccaagaggcagaacactatatacaatgtggatccatttgtgtgtaagaatgatccaaatgatgtatttttatacaaaaaccgagaagatcaaactattaacagtagcgatttgcttcaggggagggggtttcaatagggtgatggtgatggcgttttctttttacattacctatattgaaattgtttggattttaaaagtagaatgagagtgtatacaggtataattaatagaatatttaacaactagtatataaacactaggagtccctaactgatgtcctggacccccagggatctgtgaatagaattcaaggaacctgtaaacttgcattaaaaaaaaaaggacatgcttttcccactagtctctaactgatattaacttttcctgtggtagtgagtatatgccacaggctattacagtggtgatagcagggcctgcagctttgtcactagtagaaaccgcagatactctaatatctcattgcagtgattgcggatatctacgacacattgtgtatactcacctcagcctcaaaattatggaaggtacttgacccaccactcagtcttgttattttgtgcattaatacagaaataatataggactatatcagaaacctgttttctgttatgttgacatttgcatctcaaggcaatttgtttcctttataaatctatgcatttaattttacatttcaaaaaaaaatttttttttctgagagagggtcaccggatgccaaaggaccccaaggtacaggaaaggttaagacccctgaaggcctgtcccacacaaggttcctcactggtgtccccagtaggctaccaactctgagagtgcaaggactttgcctgccttctggggcctggaagactgtctggatatttgtaggctctgctgttgaccccaattatagatgggcaaatggaggttcaggctcagagtcacttccctgaggtcacccatcaagttgcagatgctagattcctcctcatgtctactgatttggaaggctgggaggtcaggtcttgtgggtgtaagagggtcaaggcgggggctgggcgggtgaaagtggtgcttccctcacccagggtacgacccaggctttagccttgcagccagtgagcccagaggatggggtgaaccctgctgctggcttctgcctgttgacccagttcctgggtctctgcccagacttgttccagaaccagacccaaagcaccaaggtttctgtgaatgggggtggcattaaggaaacttacccttctagttgttcagacccagcctctcagagctgccctgctttcctttgtctctctcacatcctgcatccaatctgttgtctctaccctcgggcgcatgcagaatctgaccacttctgcccaaccttgccacttccaccccagtcccagcccccattgtctctagcagggatcaaagcttccttgatactgtcagcatctgtcattgctccctgggcccccaggctatgctccacacatagccagtgacgtcctggtcaacctgtcagattatgaccccctctgctctaaaccctgccttgggtcccgtgtggcttagagaggaccaggactccttgcagattcctttagtgaagaacaaaattctttgctttggaaacaggtaaaacagtccccagtgaacagagtccaaaccaggctgtactgggatggtgtgggaattgggatgaagcctgttctaggtcctaggctgaaccaaagccccatggctggggtggtgcagggtgtggagatttgagcccggcctgacggtaaaaggaaacgggctttagcagggatgccccaggggtaggagcccaggcagggagacatctggggagcaaagacttagtgagggggagacctaaatgatgctctcagggacctctcagctcccatcccctccatttcacagatgggaaaactgaggtcccaatcaggaaaataaagtgccagaggctgtacacaggagctaatggccagatctggtgcagacgtatgaaaatctggagggtcagatcttacctagctgtgtgtgtgtgtttcaacttaaatgtaaatctttgtaattttatttttcgaatgggtgatataaacacattgttcaaaattccaaggaacaaaaaggagtgaagtgaaaaacaaatttttctgtccctgcctcaacccacagttccctccctacaggccactgagggaggttcctgggtttccttccagagaaacgctatgcatacttctacatctgcagtaactgtgtttccatcccaccacctgcccttcaggctacaaaaacctcagcttgccattccacacctggcttccttttgcttaacattgttcatagcatgttccacattcatccaggtagacttgcctcagcattgtaagctgcttgaaattccatctatgggcctccattgtttgctcatctagtcccctctagctgggcctgtaggatgtttccaggctttaacatcaaaaacagggctgctacaaatatccttgtacacctgtcacttaacattcccacaagtctatgtggggaataaatcctctgaagtagaattgcttcaaagtagagtgaaatcacacgtttttttggtcctttgttttttgaggcagagtcttgctttatcacccaggctggagtgcaatggtgtgatcatggctcactgcagccttgaattcccaggctcaagcgatcttcccacctcagcctcccaagtatctgggactataggcatgtgccaccaggcccagccaatttttcagtatttttttgtagagaccagggtcttgctttgttgcctcaggctggtctcaaactcctgagctcgagtgatcctcccacctcacctcagcctcccaaaacagttgtgattttgactatcgttaacaaactgcccttggcagaggttatgcctagtggtttctgcccctttggaggagaggccctagggtctgcagaggtggccacaggagccacagagttgcttattgcaccccctcccaatacgcatccacacctcccaatctcagtagcaccaaagcatctcccaccagcttccttctgacttctaggtctccctgaaaatgtcacctcctctgagaagcattccctgaccacccccactctactccacctgtttatcacagtgtgcactctggcttctacacagtacttcatgccatctgaaatcactttagtcatttgtcatttgtccaattcccccacgagaagagccccaggagtgcagaggtttgtctgccctgttcatgagcacatcctctatgcctagaatagggctaggcatatgagaggtcctcgataaatatttgtggaaagagcagatgggtcagttttgtgtaaggggcacgagatttccactgaatagttgtttggcagctagaagcaagttaggagcctcgagcccaggcccagccactgctggagcctgtgagaggcaaaggcagtggagaccacagagaccagagaacagagagctaactggtgccagggcagaaagaaaggggaagaaacaccagcacagagatgggaggggcaggaaggagggttcccaggagggaggcccatggcaagggagggagtcagcttggggtatctgcaggaggaatgttctagaaatgaacaagacatagtcttggtgctcatttccttcctccaaccaactcattcagatgtgccgagacctgggcatggtgctggggatagagcagctaccagaacaggccaggctctgcactgctgctgcggtctcccaaggaagatatctaaagggctactctgtcccaggcatgaccccaaggccctacaaatacagctcatttagtccttggtgctcccattgtcaccattttacagatgaggaaaggaaggcattgagaagatgagcatcttgcctaagtggcaaagactggatttaaatataggcctttggtctccagagaccacacccttagccactcggtgggctgcttgtggcagctagccttcaggatgaccccagggatcctggtgctcatgcccttgtgtagtcccctctctcaacaagtcaggactggctggcatgactaattagatattgtagaaacgttagtgtgacttccttggctaaaccattgcattgtgtcttctgtcttgccctctcttggaccacacgctttagaggaagtaggccactatggcctgaggacccttaagcagcccttgggaggaagccatctggaggggaactgaggccttctactcacagccagcgccagctcaccagccacaggaggccgagccccagcccaggtcaagccttcagatgagtgcagccctagctgatacctgagtgcaaccacatgaaaaaaaccccaagtcggaactaccttgttaagttgcttcagaattcctgaccctcagaaactatgaaagataagaaatgtttgttgttattttaagctgctaaatgttttagggtaatttgttatgccacaatagataactaatatactgcttttccagagcttatagaggtttaaccctcttgcttctcttctctgccatccccaggcctcagtttcctcattttgacaatgggctgacttgtgatttatgagggttggcccctcctcctctgccttgcttctgtcccctgggcctgcaccaggccctcaccctgtggctcaatgcagactgaaatggtttgtcttgtcctgtctgagcagctgggcccaagccttcctcattgttttcctctctgcaagacatactattgcttttcttctgggtcaggctctgggcaagcacagccagtgggctgagagccaggggtagagagacttggggaccaacgggctctcacggagggatgagcttctcaaccctagctcaaccctcaattctttgacacaggcccagcgtctccaaacatccagtgtggtctgggcctggagcactgcactgagagtcagcaagcttgctcaatagctttgccatttcctttctctgccagtgatgagtttctctgaacctcagtggcctcattgtttcctccttgcagagcgcctggaaggaatagggaaatggccactgggacctgtgttctgtggatctgggctaggattcttgtctgtctggttcatgaggcctagcacagtgcctggcacacagtagtgcctcccatatttgtggaatatttgggacttccctggctcctgagcctcacctttcatggggtggcaggtccagtgttcatcccaggtgaaaggccacaaggagaagatgaggagtgtggcggaaagggctgcagagggaggggagcagggcctgcctctgccatctggacttgggaggggctgccagggtccctgcctcctcaggctcaggtatgcctttggtggtcgtctatatttcaaccttgatcttgggaggtgtttgcgatcgctcacctccctgacacttgaaagtcacagaatggagaggtgtgtccattttgcttggcaacatgcttattgaacagttattatgtggtcagcactgttctaaccactaggtatatgaagtccttgcagccaccctccaaggtaggacctgttatcgacctattttacagacgaggcacagagaggttaaacaacttgtccaaggacaggtagctcttcacaggtgtaaccaggcggtgcttctgcaaggcctcttggctagagtgatcatgtgacagcgcccctgcccaccccccaacctcacctcaactttgggaaaatagggcaaagtatgttctagacacagggaggctttgctggggtatctccccacgtggcaccaggcctttctgcctgtacgactccagtgtgtacctcttctcttattggatccccagcagcctggaggaaaagggtgattgttccccacacaaatgagtaaactaaggcccacaaaggccgagcattactcacagctggtaaaggaagatttttaacttaatggctgagctctttctatgtgcctgtcttgccttcttggtggctgaggctgatcctgcagatggggtgacagggataagattagggtcagacaaagatggtggaagctggctcagaggtccacagtctatcagagaatgatcctcagtgaggacaggacagaaaagtggccacatctcttcccagtctccatggtcctccacggagaacagggtcaggaccagggacatctgtctggctcctggtgagcactccagtctcatcttggccatgctctcctcgctctctgcactgtagacacactgaatgccttttgcttttggcccattctacccccagggcctttgcacttgctgtcccgtgtgcctggaatgcttttgcttcctttccctgtctcgccactgccaacccagcctttagatctcagctctgtccttcttcctagtgcctccctccctcaaggtcaggcacccattatccacccctagcatctctcggtccctccttcatggcacatatcatgattgatcgttgcacatgggaaatcactaggttagttacacccactgctccaggggcaagggggaaggatggtcttccttgctcactactaaatccttgtcacttgcatggcgcctggcgcattgtaagccctcaataaacagtggtggaagggacaattaaatgaatgcaggaatgaatattcttacctgacaaactaagttcagagttgtgtatacacatttgtgtttgtgtgtggtggggggcaggagtcgggggttgcacatctacacatagtcccagaattgaaaggatgcatgattttttcatgacatttatggcatgctatgtatcttgttgcctctggagaggagaaacaggggtctcagctgggtgtcaggaaccctgggttctgggccaactcctgccaccgacccttgggtgaatgtgattgagtcactcccttgcccaggcttagtgttcccatctgtaaatggtgggcacagagaggtggtctgtgtagtggttaagactgtgggttctggagccagtctgcccgggtacgaactcacctccctcacttcttagctgtgtaaactccctgggcctccgtttccccgcaataaatggggatcataacagtccccaccttttaggatgccacgaggtttatgagtcaatgtttataagacacatataaagtgcctggcccagagaaagtcccatatgtgaattcaccccagcaaagcacttatcccagaagacagaggaaacaatagtagcatctcctggttctctgtgctggagcagtgccaggcacatcccctgaccagccatttgagcctcacagcaaacccaggcgatgtgtgtatcatcacctcaattttatagattgaaaaactgaagctcaggtctttctcatagttacacagctaataatctcacagatgtaaagttgagggaacaaaaggaaactatagtaagatatggatggtacgacaggattccttccttgcaccgtgaatcctggagtcttgacgtttactgagcacttactctctgccaggccctgtactgagccccacatgtgcattgcctcatttaatctcctcaataacctgcaaagtagcttctgttagtgtcctcacttcacagataaggaaaccgagtcacagagtggaaaagcaatggtctgagaaggcacagccagtaagcagtggagctgggattcagactgagtcaactgggactcagggcctacactcggcttctgtgggatttgcccccaggccctgggccaagaatggggtgtgtaattgtggggacacccagactgagcttctggagccccttagcttttcagaacggccacagctgcctgaggccctacctgaatcatccctggcagaaaagccctagggagccttgggccaagggttcctgggggaagaaaaatctagtagctatggatctcccctttggggaccagggtcctctatattttccaggtcccagctaatgcccagggacccatccaccatggacatggcttatttattggacagaaaactggcttaagttctgagataataggttccggcatcagatggctgaatctgactttgcccttcttggctgtaagatcttgggcaagtcacctaatctcttggtgcctcagtttcctcatctgttagtggacaagcaatcttacttcactgggtcatggtgagaattaaatgccgtaacataaagcacctaggacagtgtgtggcatacagtaaatgctcactaaatgagtgcttactcattacgtcataactgctttttcatcctccactcattctgggaggcacgagtattttgagttccactttagagaggagccaattgatatatgtggcttccccgggttcccatagctttgagtggtacccctgggacttgacctcctgaccccaacttggtcctccccagaccccacagccaactctcagggttcattcctgacatttcagagctggctctgaggttatgcaaacaaactgcggccagagtctgactggaggtgcaggcttagggggcagacctggggcccgttttctaacatttcctgcccaaggagaaggagaagaaggtctgtgtacatcccagcctggctgagctctaaggccagggaggagagaactagaaacatgtggccctgccctctgtgggatggctggccaagccagttgaacaaataaacccgtccttttgggggaagtcgtcagggggtctgctgctgctggtgcctgccctgcacccccacctcatcccaggcatgagccagctggtcatccccaggccgagggtatctgtgccagctgtttccaggcccccttcttggaaaaatcatcccattcctctaagaagcagatgctgtttcccccatcccccagtcccaaactgcttagaaaggagccagcagtgaggttaggaaatcaaaccccaagatattttgttcggcaccgagactcatttcttgtttggataactgaaggctgaaaatgccaagaatttgtgggcagcctgggaaggctggggcaactggaaccctgactcccaaaccaggtcagtttgggagggtctcaggctgggcaaggaccccaccctgggttcctccttggtgctctcttgacccacacccagttaggcagggcctcacaactgccaggccgaggggcccagttattctgaggtttgatgtcagagacctggagcaaacagcagaggctggggcagtgccaggttgggaggcccctgcccagcccctgacccctctctgcttggctttgggtgcagaggaggaagagaaagaggcctcggctgagcagccagctgcagggtgggcattggtcatttggcagatgtgccctgggtcttcagtgtggacactcggggaggtagaggtgggagggatggccttggggtgagaaaaggaggagctgagaaagagacaggaaaagatgcagggagtcactttgatagccaaccaggagagagaatcagagacagagacacccacagagttagcaacagtgagtcagggccaccgcgagagccccaggagagatccacagaggcagagagactcagaaatagagacaggctgaccacagtggctcgtgtccgccgtcccagctacttggaagactgaggcgggaggatcgcttgagctcaggagttcaaggctgcagtgagctgtgattgcaccattgcaccccagtgtggttgagagagtcagaccttgtctttaggagagagacagagagagggagagagggacagagagagggagagagagacagagagagggagaaagagacagagacagacagagatagacagggagataggcagagagagggctgccatggaccccaggccagcagctgctggctgctccctaaaggtgagaaagtagttctcacctgcagtttccaggtggggtcagccctgcctctgggagctcagagactggggaagatgtgctgccctcaggtggtgggggtgggccagagaggctggggcttgtgtctggccctggttttcctcattctcctcatctgtataatggatcattctgtggggccatgaagagaaggcagagtatggcacttcttggatgggacacctggggcaactgggggaatggcagtcacacacgggagcccttattgagcacctgctgtgtgcagaggctttctctgctctgcttctcttgaccccacatcaaaggtcaggggtaggtgctgtcattctcctcccagcctccggattaggcactgagagggaagggccagcactgggtcctagagggagggcatggtggacagaggaggtcatgtgactagccactgagctgcccagcccagctagagatgcctgcactgcagccggctctgtcccccaacctcctcaatattcctgcctgcagcttctcatccatatgagcggggtggagcagagcccagagctgacgtgcagccccaggagctggctccagatgggagttactggggcaggggctttccaggagcgaggaggaggagagagagggaggcagaaggagggggagagcagggagaagaaagggaaggggagtgcaggggaggaggagagtatgaaagaggagagagagagaagaggtgaggccggggctctccccatgcctgatgagcactggcagtaggacacagcaagctgtatgctaggaaagagtgcgtatctggggacttggaaactctgcagtagaagggagcaccaagagcatcccatcctctctagatcttgcttcccttgcctccttgacaccttccagagtcaggaaaaagtacctgcagtttgtagtgagaatccagattggctttcactgctacatggctctggcaagtcactttccctctctggcctgtttcctcacctgtacactgggggaacaggaggggagttgggggcacaggctgagcagatgatggcttctgggattcgcgacaggaaggatctcccctgtgtctgtctagatgaacagaatcttgctgagagcttgttcatccctaatggcaatggtgatgatggtgatgatgatgctgatggtgccattagatgagtattttaaaactctttttttaacttttctgagatgttagagaaaaagccaaaaaaaggctttgagtttcagaagatctgagatatgcctggaccaagagaagaaccagaggaaggtcacagccacagccacagaaggtagcaagcactccccactggggaccaggagtgtcagagggggcagagagaaattattgtttacatgaaccaagggagaccgaaacctgctcatctgtagccatttggtaaggaagtacctgcagccaggtcagctgaactcccatatcagagatcttaggccctacggcactctacggtgacctgactgaccctagctcagaattttcaggctaggtgaatggatgcctggagaggacattccaccccaagctgaggcactggaccaggtgaccttctgatcctgcaagccatcagttcaagccatcagctctcagccaatgtttcccaagcatccgacacccaggggattcaaagatggatgagagtgagaggtgagacttggggtaggaggcccagtgggaggtgatgacagcatcctgggaaagatgacgaggcctaagccagaaagatggaccatgagagaagcctaggccacaggatgggctgggccagctgcctgggggataggtgggagccacaggaagcccccagggcacagcctgtggctgggtggtggtgtcaccctaaacagagacagacaggcaggaggagggtgtttggagaagagcagggagtcgtctcaggcagctttggagttgagacacccatggaccctcagggaggtgttgggggagatccaggtcatgggttttgggctcaggatcccatcaatgccaattttgtgtcatcacggagcaggatggagacctgggacctgagagattggaaggacatttatgcattcatgcattcactcatgctacagacatttattgagtacctactgtgtgttcggcactattctaggccctgggaacccagaagtgagcaaaagagacatggcgcctgccctctgggagctcacacaccaaaagaaatgtttttaagaacattaggtagggataagttctaagaaaaaaaaacacaacaaagccagcagagggacaaagggtggaagaggaaggtggttatttcgtacggggaggacaaggagggcctctggggagatggcgctggagaggataggaggctggggtaagcaaagtgggagtctgggagagggaactccagggagtaagggttcttgcttttattcggatgcatggttagccctgggaggagggagaggatgtaacttaggttttgatggggattctttggtctgctgcatggagaacaggaggtgggggccgagtgttagcagggagccaggggggcagccaggacagctatcctgcctggagccagaggtggttgtcaagcttgtctgctgtttaataccttctaaaactccaggaattagttcgcatccttcattcctcagtcatcgcccagactgtctcctgggtccctctccctttccttggtagctctcacttagggactctgaagagtcccatctcagaccccccaggatgtctcctgtaccctcatgccccgccagggccaagcctgctttgcacacctctgtagtcagtgcttctccgagggtacacaataggtgctcacactgctgaaagacgaaagcatgacagggcattctacagcagccctggtcttgggccaaaaccacagtggcatcctcagctccttgcttcctcccactccgcatccaattcaccagcagagctgatgggctctacctccagaacccaccagaatcttactggccacaccccctcctagccccgttctgctccaggcctccggtaccttgcacctgatggctgcagcggccacctctttgggcttcttccttccaccctgcctcctacagtctatgctgttgaaatcgaatcacgggtgtctgtctctgctcacaaccttgcagtggctcccatgacactcagaacaaaagctgaagtccttccagtggccccccccccagctgcatggcctgccctgctgtcacctctcagacctccccgcacccttgctccctctcctctgctccagctacacaggccttcgccccatggttctccaggcacacaccgctgcggatgcattccctcctcacggtcaaaatacatgcagctccctttgcagaacgttccctcaaatacctgcctggcccactctatcatttcccttgttctctgggttcaaatgtcacctcctctgagaagtactctctaatgatctgacctcaagcagccacccagggccgccacttgccctctttcttcttcattttgcttcaccatctgacatagtagattatctcttactgcctctttcccctactagtccagagggagacatactatactgtcgtatccccagcacccaggaaggcttggtccgttcagcccttggtcagggctgaatggatttctgttggatgaatgaagggacggcagttaaagagccaggttgccagctgacattgcccaatcttgctgtgtggcctcagacccacccctgcccctctttgtgcagctcagagacagccctctgtgctcagggaaggcctcttggatggacactccacctgctgattgtgacagaccccaaagccgccctctgccccctgcaaacctcccatgccccgtaccttcttcagccactgcgtgttgttctgcagtgcctgctccagctgtttcacctgctgggtgggcaacttccccaggtgcagtgggttggccagtgattctctctggagggtgttggagtccctggagacctcaggccccggagggcagggctcagacttgggcagcaagaaggtgtagctacagtggccgtgctggactacaagtgtctcgcagcccctatccgcctcctgccttgtctgttgagccacagacatggtggcaaccacaaggaggaggctgccctgcagcatggctagctgggagagcatctgaagatgtgtcaatggcgagggatgtctgctcagagccctaggggctgtgcctgggatgtcctgctgcagccaacagtggccaggcttgcctgcagctgcagctacaaacctctgtctggccgagctctgtccaggcagctatttatacttgctctgaataccacggctgctctgcttgcttcctctcaccgcctccctccggccccacccgacaccctctcacctctattcttcactccttcccttcctccttcctcagtcttggtggcacgtcgcccttaccctaagcgtgcaccaaccttgctctgtctgcctcacctctgagccctctgattatccagtgaggcctggcttccctgctggaggggagggaagaaaacagcacacagacacgcgcacacactcatgcacacactcacgagcacacactcacacgcacgctgacacgcacacacattcatgtacacacaaacgccaagctccaatgctgcccgctttggaaaaccaaatgcaacttaactctcccttcctgtctctgtcttggtctccctctttccctccacccccatcccctgccccccaagtctaagatctcaagtttcagtcccgctgccatccccttctctccccgctgcaccttcctccctctggttccatgttagcgcttggagtacaagtgacccccggagagagcagagggaggggaggaggcagaggggtgaggctggggagggcccagcgaatccactttgcctctggagacacagaaaatccttccaaggtggggcaagtgagcaacccagctgggagttgcttcctgtcctctcttctccctcagggccaggggaaagtggtatgccccaggatggccctggcttggttgcttgtaacagtaatgagaagttgtcatgtcctggggcagattgtcctggggctgctggagtggggatgtggagaggaggcagtggggagaggaggttggagtgccaggaggctaaccctagatctcgctccccgacagctggccacgagacctagggtgggcagctgtgcctctctgggcctccacaccctgatctgtaaactgggtaaaccttatctcttgcaggaggaatgcgtgtgagtcctcagcatggggatggagaagttttcagcttctgggttcaaatcctggctctaccatctaccagctgtatgactttgagtaagtcacttaacctctctgtgccttcatttcctcctgaatgaggaaaataataccacctacttcacatggcatgaaaattaggtgagttagagcaaggttggcacagagcgagcactaaataaatattttccgttgtcaatgttatagttgtcattgcacctcccctcccacgacccactggagcataaactcctctagggcagggatttgtccctgggggacatggtctccaggcagaaggtgcccaggagttggtggggcctttcctgcatgggctgcctttatgttctgccagctgtttgggcttttcctctctccctgcttgtttcctcagagtaggggccagtctggctgtttagtattttcctttttgttctctcaaatcccgatagagttttgaattggggcaggctgcttctgggcagctgtgaactgtggtctcatctggggactgagaacattataccaggtgtggggcttttgcaggcaaaggaaaagcagctggttatcagcctccagcctcccctgagccttcccacatgctctgagctctgcgtgccccgcttggccccagttgcctcagctgtaaatggggtcatagcaccctgaccatgtgagagtaatgtggactgatagcttatcacagctctgggtgcagagaagggcagtgtgaatggtggtcgtcattatgattgtcttgactgagctgcttgataatcccaacgaggcagttacaccaggccccaagcttagatgggccccatgcttggtttacactctgccagcactgtcttgaaattcttaatacatttggaacaaagtactcagcacttgcattcttcattgagttccacaaattaggtagcaggccctgcctgggaaacatgaggcttccctcatccctcactctgctcctgaccttaccatccaatcagacctgttcttccaacatgatcctttagatatttccccctctgtcacctcttcactactcagaatgctggagccagcacatctggatcggaatcttggctttcctgaccccctatttgtgtgccttttgccaagttgcctaacctgtctctcagtttcctcttctgtcaaaatagtgatgttacagtggctaaaagaccgattcctgcagtgaggttaacacagagcctttcacataatacatgctcaaccagtgacagctgtcatcattactccctgctatgatatgaatgtttgtgtgcccccaaattgatctattgaaacttagtcaacaaggtgatggtattagaaggtggggcctttgggagtgaatagctcgtgaggactctgccttgggaatgagattaacgctcctatcaaacatgtcctagacagctggccttcccttttgctaggtgacgttgcagtaagaaagcaccgtctatgaagcagggagctctcaccagacaccagatcggctggtgccttgatcttggaattcccagcctccagaactgtgagaaataagtttctgttgtttataagccccccagcttagtgcattttgttatagcaacctgaatgggctaagacaccccaccatcactctcttagaccggggtgcttcctctcttgtagggagaacaacagcctcagaagtgaactctggttaattggcctttgctattgcaaccagagtgaccttccttccttccttccttccttttttctttctttctttccttcttctctttctttctttctttctccttttttttgacagagtcttgctctgttgtccaggctatagtgcagtggcatgatcttggctcactgcaacctccatctccccggttcgcgtgattctcctgcctcagcttccccagtagctgggattacaggcatacgccaccatgcccaactaatttttgtatttttagtagagacggtgtttcactatgttgcccaggctggtctcaaactcctgacctcaggtgatccacgcacctcggcctcccaaagttctaggattgcaggtgtgagtcaccatgcccagcccagagtgatttttctaagacacaatccagccctgacttctttgtttaaaattcttcagttttgaactccaactctttctgtggtttacaagcccctgccggatgtggcctccattctcatcactgtttccctggcactttataccttatcatttggaattggttttactcccccgcatgctttccgccttctgaggcctcagtgtctatgctcctagcaggaaacttctgcttaaaaacttccccccacctgtattgtcccagcttcgttctgcctgtcttttgatcttatctcagggatcacctcctctgggaaggctttctgcatctgtccctcccacttcaatgggagtaggccttctgcctctgggagctcaaaggcccctgcctgcctgtccctcaccaaagcactcatcctgcattagaaaggcttgtttgcaggccttggtcaccgtctagactgaacactcttctaggtttgctgtcacactttccatttctgtgtttgttgcctgtcctaaggttaggctcacagtgggtcctcatgagtgttatgttgaatgaataggagctgcaggcccaaagcagagaggaaggcagtcccctttcctctccagcaggggcagcaggaagttctgtgtgagttgttctgagtgtctggcctccaaatcctaaaaacaaaccaacccatgttgattttcccattgtctgctgctaccatggaggtagagaacggagaataaacttatatccacctggatactttggcttttgttcaaatagcttgggtaaaaagggaatttattggccaatttaactgaaaattttaggggtatcgagcttcaggcatggctggatccaggtgctcaaatgatattagattttttttttttcctccaactccaggctcttattttccttcatttccttattttcctttgggttcattctgtaagagttcccaccataatcaccaccactactggcaacagcagctccaatctatcaactcagtaacctcttttaagagtgcctctttcctaatagttcttggaaaagttccagcttgagccgtacagtcattcctgaaccaactattatagccagaggaaggagctactgtggatggtcaggctggatcctgtgtccaggcctggagccttggagcaggtcaacctcacaggatcggaagggactaagggtggggtacagtgacgctcaagaaaacctggagtagaatgatcaggaggcgggtggagttgttgggcataaagcacctgcctgcctgcaccctgactctccatcccgccacccaccaagtgaacccacctcccgctcagagctgatggactcttggagtaactagagatgccatggacccttaccttgcatttcactcatgaggaaactgatactcagagagggaggccacttgcccagtgttacatgctggaatctattttcctggaagaacagaacttcctgctcctaggagtgaagggtgggaaaacagggtcattccgggaggaccacttgccaatttggggtcctgaagtacctggatccaaaagaagaagactgtccccagtctgaatctcccactctggggagagggtcactcctgggttgttcccacaatccagcccttctgccagcccctcccttggcaactccttgcatttcaacaccctggatgatcattgagggttgcacgtggggcagctgaaacagaccccaggcctctggtcctgtgctgctcatgcccctgaggacactgcctgggcatctcccagagctactgatggcaacatggcaagagcctggtgggaagctgtggggccatcgacaaccccgggggatggtctgtgtgtcctcagaaggtctggtggtgaatcttgtgcagcagacatcatggtggccccgtgagcctttccacccaagacagaagtcggttgactgccctcctccactttctaccaacccagacctagagccaaacagaattcctggatcacaaggggcctagggtgggttttgaggtcaccctgtgacccaggcccagctgttaagagccccacattcctgatgctcaatcttgacttcccttcagtagatgagactcagtttcctcatctataacatggagaaaataatccctcactgggaaggcggtggtggtggggtcttccagttactgatactgtgtaacaaagtatccccacatctagtggtttaaagcagtggcaacatctactttactcacaaatctgcaattgtggccaggttccctgggaaaagctcaactgtgctccattccgtgtcagctggagcaacttgcaggctggggtttgcatccaaaactcatccactcacatatctgaaacctcagctggggcactcagcaaggacaactgcatatggcctcttcatgtggctaggggcttcctcatggcatggtggctgcttcccagagcaagcatctcaggagagagatttgggcagaaggtaggtgatctttatgacctagcctcatggatcatgcagggccaagtcctctgtatctagtcaaagaagcaaccacaaagtcccactcaagttccaggggaggaagaacagactctacctcttgatgaggaggatcaaggtttcagaagaaggtataggatgggggatagtgttgtggccatttttatttatttattttgtttatttttaaatttttatttatttatttatttttgagaaagagtctccctctgttgcccaggctggagggcagtggtgtgatctcagctcactctaacctctgcctcccgggttcaagcaatgcccgtgcctcagcctcccaagtagttgggattacaggcacatgccaccaagtctggctaatttttgtatttttagtagagacagggtttcaccgcattggccaggctggtctcgaactcctgacctcaagtgatccacctgcctcggcctcccaaagtgctggggttacaggtatgagccatagtgaccggcctgttatggccatttttagaaaatacaactggccatgggagggtcggatgagaaaatgccatttaagtgtttagcatgtaagtgcttgatagttggtagctgttattattatctttgcgattattggaaagacccagcatctctttgcataaaaatatccttcagaacctgtgagagctaaaggtgcaggaggaagcaggataatttccatcagggctgctggagaaattggcccagaaacccactggatttgtcccaagtcacccagtgtatcagcagcacccagtctgagcaagactggcctgggacatagctgcttcttctgttagtaacgctgttactacttcctggggtatcttccttggcctcagcttcctctctgaaccatgagagcatcctggctctgcctcctcagaggctgaggggataagggcggaggacatgcattctcttggctgtgcccagtctgggccaccagccatgcctgttctttctcaggcctggggagctcggttgcctctgaacccacatctggcactccctccaggatatgaagaataagcctgccaggtcagagggcagatctattttggaacctgggaccccataaagacccagaggaccctgtgaccgagaaaaccaacaggcccctctgtgttttgttttcattaaacaagcacaacatgtccctcatagaaaagccagaaaatacatattggcaagaaagcgaaaataaatgttgcctgtgctctcaccagccagaggcaaaaaccatagctaacattttggagttttttccccccaaataattttcctctgcatatagatgcatattttttttggtagattttctagcaaaaaaaaaaaaaaatcaacaaacaaaggaatattgtctcaacaattttttaattttcttttacttactttggatttttcttctggaaaaaaatttagagccaggcacggtggctcatgcttggaatcccagcactttgggaggccgaggtgggaggatcgcttgagctcaggagttcgagaccattctggccaacatggcaaaaccctgtctcttaaaaaaaaaatactgaaatctccagacttccaattggaatttatgttggccgggtgtggtggctcatgtctgtaatcccagcactttgggaggccgaggcaggtggatctattgaagccaggagttcaagaccagcctggccaacatggtgcaaccctatctctactaaaaatacaaaattagccaggcttggtggtacacgcctataatcccagcgactcagaagactgagacacgagaaatgcttgagcccaggaggcggaggttgcagtgagccgagatcatgccattgcactccagcctgggagacagagggaaactatttctcaaaaaaaaaaaaaaaaaaatcagacaagtgcacaggataacaaaatacacccccatatagtcatcactccaagtgggcccatgttaacattttgcatatttgtcttcgattgttaaaacaatgaaatattacaggaaatgtcagtattccttataactccttcttggtctcattttctctcccaccctgcccataggttcatatctaggtatataaataatgtataatatttttgtgttctcaaaacttaagtatatgctgttatactgaatgcgacgtcctgcttatattatattttccagattgatataaatgacacatatagatcttgtgaccaaggacattttcttttcactgctgtgcagcattgcattatgtaatttttaactctttatccagtttttggcagatggatatttaaattaattcagttatcttgttattcctgacaatactgctattaccatcttatatgggaatacttgtgcttacaagcaagggctcctctggggaactaatccaggcatgctcctcctgggtcgtggaatatatgtgctgccagcctgaggcagttgccaaattgtgctccaagtctctctgtcgagttaattccagtagggtgccggggtctccatcgctccgcacccctgccatcccttgagatggtcatgctttacctttgttccaatctgatggctgtgaaatcgtacatgtaattacatagcctgctttccctacttaatagtatattacggaactattttcctgtgcagaatattgttctatatgtgggtgtttcaaggtggcataagctgaaagcctccattggggtgttgctgggattttcttaaccaattccctattgttggacaacagggtttgtttttgtggtaggattgcaaaactgaccacagatgctacccacccctataagcatgctcctttgcagtgtgactctgcagttctccctattaagaggcaaagttcacttctccactcccttaatgctgacttgggccatgtgacttgctttggccaatgggacattttcaagcagaggcttgaaaagggcttgtgctctggggcttgctctcttgctgcacctggggccctgagaccaccatgtgaatgagtcctggctagcctgagggatgatgagacacacttggccaagtcatcctgtcatcccagctgatactaaaccatccaccagatttgtgagtgaggccatcctagaccatctatctagcccagccaaactggtgcggaccagaagcaaagtccagttggcctgcagagatgtgaaaaataaatgttttaagccactaaattttagaggtggtctgttagacagcaagcctgatacagttccacccagcattttctttgctcaaccagttactggctgggaaccttgggcaagttgctgagccttagttttctcctcagtacaatgggggattacatacgcactcctcaaagtcgttgtgaagattggatgagatggcacctgtcagtatcacatggcggggaccccataaccaggggttcctctttcacatcacggtggtcttagatgtgacctgtgacctttcttattgcttcttggttctccctgctgcctctttctcaaaaatgtactcatccttccaagttttctggagagtatcaacatgtaagtgtaaatcacaatccctagtgctctccaagacttgcaggtatctcctccttccagggccttccctcttgaaattaggcatagtggctgtgtgcagtggctcatgcctgtaatacaagcactttgggaggccgaagcaggccgatcccatgaggccaggagttggagatcagcctggccaacagggcgaaactttgtctctactaaaaatacaaaaattcaccgagcgtggtggtgcatgcctgtaatcccagctactcaggaggcggaggcatgagaatcgcttgagtctgggaggcggaggtttcagtgagccaagatggcaccactgcactccacactccagcaagacccggtctcaaaaaaaaaaaaaaagtaaggaaaagaaaaagaaaagaaaaggagtctccatccagaccccaagagagggtttcgtggatcttgcacaggaaagaattcaaggtgagttgcagagtgcactgagaagagatagtttattgaaagctactcagttacagagaaggatgtcctcagaaagcaagaggaagaacgcactgtctttgttttaaactcttctaatgtaggagtcttatctaagtaaaagctaagttatgtctttgtgcagacagaccgacagtgtgacagaatccattaccgttgacttaaagaaagttatccttggcattttagtaagtacatcagatcacgacagtaattgttttgaaagcataaattgttatgtgatattggaacatctgggcattttgctgtcgtaagagtttactcttgcaggcattattgagcagcttccttagccataaacatcttatgactgtgggctgtgattagcaaggaatgtgtcttgctagttttaagatagagttgattttaaaatggtgtcaccctagctctcctatgctcctgtttcccaaacataatcccccctctacttaagagagaaccctaaatcttaaggggagatgaaaggtgaaggtcatttttctgtaacttattcctgctgacagtggacgttgttgacctttgggagagagttctctcataagagtttgcagagagccttgtagggagccggggaaactcttcacttgaatgacatcccgatgatttggtttagtaagtgtaggggcagataagctgccagactattttatctccgtaatcccatgcaataagtgcaacagaagtaaaaagcacaataaccaatagcaataagtgtgacaacacgaagcatgctaaaaaggaatgccttccaagtgctggggagctggccaaactgtgctgttatgacaggaagtcaattgctgaggtatgagtctctagggagttcatggcctgagatatattatgagagtgaccaggaatatagacacagtgttcagtcttgatcaatgcacagattttcccagggctgctgttaatatgtttaaagccatatggctttgtaaggacatttgtcttattcgggacgtttcttctgtcagacgggtgatcaccagatgagtgttgttgaaagccacagcagtatgttttgctagggctcccacctgcgattcaacgtctatagatgttgcttaaagacagaatatgggcacaggatataaccaccaaaaagtttgtttctgttgcctatcacagaccttgactacttcccagttggtggagagggaatccagatgtgtaaggatacatcctagaaggtagggatgaccccaagtgcatcatccagtcaaattgtaaggtgagtatggccaactatgagacccacatgcccataaccattcccaaggggaaggatagtcacctaaccatagagattcattttgccatcccatccacatttggtcaattgaaaggagagtctgattgcattgttggggtggcagccatccgatactatagatgttggtttgggggtggttactgttgatgaaaagagtcgaactctgtaaaatatttgaagagacttattctgagccaaatatgagtgaccatggcctgtgacacagccgtcaggaggtcctgagaacatgtgcccaaggtggttggggcacagcttgattttatacattttagggaggcatgagacatcaatcaaatacatttaagaagtacattgatttagttcagaaaggcgggacaactcaaagcggtggggggaaggagaggcttccaggctataggtgaacttaaacattttctggttgacaattggttgagtttgtctaaagacctacgatcaatagaaaggaaatgtttaggttaagataaaagattgtggagaccaaggttcttttgaagtctcatagtagctgccctcagggacaatagatgacaaatatttcctatttagacctttaaaaaggtgctagactcttacttaacctcttcaggattgggagggcctggaagaaaaagatgtagctatgttaatagagattctttacagatgcacatttgtccccacaaaggacagctttgcaagaccatttcaaaatatagcaaagaaacatgttttcgggtaaaatattttaattttcttccttgtctcataacattatgccagggtcaggtcggaaagtaagtcacaatatgtagggttaaataaaacccatctgaggagaatttatggtttgtagggcatgactcccagaccccttagataggaatttggacaagaaaaaaaaaaatcagagcctagtcctcataaccattatgccttccaaggcataagggtactttgcctgataactgaatttggatacctgtcaaccaactgagtccatcatgtatggtatagcctaaggtagggatgctattaagttatttgggattaaatgaagaaggaatttcttggtttcggtggaggaagggaagaaagagtggtgtgtgtccttttggaaaaaggagagtacatattttctgtactcaaattagctgattggatatgccaaggtaagcccgaggttgacaaagtttgtacccattctgcaaacagatatcctccaactctataatagagcaagctcaacattaaaaccagtggtcttattttcagagcatcacttatccactggatagctttttctggaagagaagccgtagatccactattggctcacaggagtattctggaatggtgatccctgcaccagatgcctgtgggacttcatgagagacaggtttaacttgggataaatgtacccaaatatgtaatcccttaagtttaactgtagtaggagtgcctggaagtacatggtagggctctttctattttggggaaagctgatctgcaggggatccctccttccaaggtttcaatagcatgaaatctcctggtcaaacaggagagaatatttatgaagatggtcctgacacatgtatactgaacaaacatgcatgtaacatatgactctgttcaccttaaggtggagacttaatccttgccaggcatggtcttagatcctgtttataatttgaaatcttcttgctataaagtttctattctatcagtcttatgatctctgttttaatgttaatgctggttggttgtgcccgaattccaagagggagaattgtacagcaaggtgtgtttgaccccccagtccctcttcccatcatggccagaaccagttgttcaggatttttaaaaaattattatttccttttgccaagagagaggtccattctgttgggtggcttaggatatttgtttatttattagtttagtttatggtatcccattttgtcgaggtgccagaggcagtattgaaggctaagcttttattgtgtcccatatcaatgctggggtggtgtcctacttgccctggtccattacctcccttggtggaacacttatggtcaaggaacttagagtcaaaagacttatagccaatcaaatgttctaggccagatgggaatggaggtgagcaggcactcattaaccttaaagcctctttaagcaacataagagccaaaaatcaaaagccagaaggcaaggtataaaattggcttatttagaaattctatgcaagagctactataatcttggtttgtggcaattagctatacaaactcaagaattatgtttagctatttagggatctgtgtgcctgtccttgatttggagtgtcagaattaattttattcctcaaaactggcccttacaatctcatgtgatagtccctgggcatggaggaattgaatagtttcaaattttggaggtaaaacaaaacataaggcattaacaacattttaaacaaaaggtcataagccctgcctagttttgagagtgacaggaaaggaagttcacaggtagctaaacatttaaattatttagtatcaagacatagaataaattatattatttcagataaaggcaaaattattaaatgagtcttaatgtttttgaatacaggactgcctctgtgtcttatggaagcagtttattttgattgtcacttttgtctaggtctaaagatgagactttggtcaacttgagtttggtgtcagatactggcagaagtcagtgccttcttcttttttgggacagagtctcactctgtcacccaggctggagtgcagtggcatgatcctggctcactgcaacctccacttaccagctttaagcaattctcatgtctcagccacgcaagcagctgggattacagatgtgcacgtaccaccacacctggctgatttttgtatttttagtagaaatagggtttcaccacgttggccaggctggtctcaaactcctggcctcaagtgatctgtctgcctcagcctcccaaagtgataggattataggcatgagacactgtgcctggcagtcagtgccttccttagatgagatattggacccagaagtcaaagccctgtaacttaacagcacaaggattagttaatagcacctgataaggatacttttgagggggatagagtgagccctttaattgatgttcttccaatatatgtaattatcaggctggaggtggtgatcctggagttcatggtctgactggaagctgtgaagacttacaatcttcagtgcttaatttttatggctttagtaagccccagcaatatgactaagtcagagacttaatttaggattttgattttgaagatgtttgttaaagatgttaaaaggctcaaaacatttgatcaaaacagaagcacagatcatggtaaaatagcatttactcatttacccaaagtgatcatcgaaatactttaaaggcaatacagaaggttacatggatgtaaaaaccttaacccttttaaaatctcagtttctttagcaatgaaaaacctaataaagacagcatagaaattatcttgataatacataaaatctcagttttttaagccatctactaaaaaagcaaaaaagccctactgcattgtgactacttttacttattggaagctcatttagataaccaggaagtcaaacttgatgaaaaaagtgcttgaatttaatcagacacaggaagactgttttcaaggttatgaatatagcaggggaatacacgactcctaggaacagcatgagaagttttctgattgcatcaaaaatttagacatatcaagaaaagccagtgtacagaatgcagttatactagaggaaaacattgcttttctagacctccaagatgcaatatgttagcatttggccataataacagttagaaccagagcagggagaaagttatagaagctgacagaaaaattaaaggagagagttgttatctcaagcattctcaaagggagaaacagctgaaagctgtttttttcaacagcacagcaacagttgaacttttgagatatgattctgagaagttttaaaaagaaaaaggttataaaattaaaggtaagatttcctataatttatttaaagagcatatcaatatcttaagaaaaccttgttttgatgtaagggaccaatttttagacaaattattataaataatttttttataactaatgatatgcaaaatcccttttacaaattcccctttatgacttacatagaccatctacgacatgcttggactctctgacttgtcctgaacttccctctttgctaaacaatcagtcattttactttaggacaaaaatttaccatataagactctttttcatataaaattattctcttttctttataacctttcttaccataaatacatcttcatatttataactttctttacatctctctctctcccctacctactggtccctttctaccttgtttcataagtaaacattttcaagttcgtaatttgaattgaccttcaattcagataacttctgaattagacaaaattatttttttctcagtaatactagatcttggcaggcttttggcctctaacatcacccagagagaagccaaattaaacaacctaagaagcaaaaatcatcaagaccagaaggaaaatgttaagtgtaaacttcaaagcatgtgagcgtagggcgacatgtgtcactactgaggcacagacagcaaatatgtagtcatcaaaagggacaaggggatcaagaagcagtaggtgctggaaaatatccctctgagcctcaaacagtttatgcatcagggtgacactgcaaccctgggcccctaatggcagaaaaacgccacacaacagggtggcagctgaccagaaggatcccacaactccaggctccctagcagacacagcccaaaggatccaacaactctgagtggggggctccaacccctgggccctgagaatataaaggaacatgagtgtccctgtgtctcctggggctcagaaggctaggctgaaaagtgacaacaaagggaagggcactcacctgcctgtgaatccaaaactggaaaaagcaagaaatcctgagctgtttgtcagatgttagcattttatagataaagccattctataattttagaaacatgctttcccatatcataaacttttcttaattggaaataacccagacatctgatgagtaatctaaggaaagctgtggaccaaaattttgggtaaagtggtctttatggaagttaaaaaaaaaaagatttaaaaaaagatttaaagattttttttttaaagcctggctgggcatgatggctcctgcctgtaatcccagcactttgggaggccgaggcaggtggatctcttgagaccaggaatttgagagcagtatggggaacatagtgagactctgtctctataaaaaattaaaaaaattagctgggtgtggtggtgtgcacctgtggtcccgaatacttgggaggctgaggtaggaggatcacttgagcccaggaggttgaggctgcagtgagctgtgattgtgccaccgcattccagcttgggtgacaaagcaaaaccctgtctaaaaaaaaagagaaataaagaataaataaaagaatacatgaaattaaattttaaaaaagccttttccactttttttccttcagtgtcaaatgaacttctaatgtttccatttcatctagaactgactgaactgcgttaagaaaaataaaatctccaagtagacttgaattagtaatacataaacagtgagtcttatctcaacaccagcagcttaataacagcagatttaaagcaggcagaaaagaaaagggagaaatagataagagagctttagaagcaataatcagaggcaagcatggaaagtgaaagtagcaaacttctgggctggccatacagagctgtcataagcctgcagtaaagcaaaggtaacaagctgggaaacgatgagaattacagcattcccatacctggcaaaggggacaatatggattagttcatagcaaacatcttgcaaagctacttccatttttccaaatataccccaggggctctaaccccatgggtctttgggcctctgatctgagtattataccccagggcctccaaccctgtgagttgggcctctgactccatgggccaggcctctagcctgagtttctaggcaagtgtccttgcctaagcctgacatagtacaccaagatggacctcacttaccagaagcggccaattggtgctgcagactgaatttcttttgcatagggtctcgtcttatgcttccttcatggtcgctaggaagatgttgccagaaaaggggccatgattcaaaccttaaaaaagggttcttaggcctcacacaagatggaagtcaaggcgagtctcaaagtgcattgagaacagatagtttattgaaagctactcagttacagagaagggtgttctcagaaagcaagaggaggaacacattgtctttgttttaaactcttcttatatatgagtcttattcatgtaaaagctaagctatttctatgtgagtggactgacagtgtgacaaaatccatgactctgttgatttaaagaaagttatccttggcattttaatgtgtaagtacaccaaagcatgactataattattttaaaagcacacattgttatgtgacatggaaacatctggacattttgctgtctaggagtttgtccttgcaggtattattaagtggcttccttagctgtgaatatcttatgatcatgggttgtgattgggaaggaatgtgccttgctaactttaagatagagttgattttaaaatggcatcaccctggctctcctatgcttctgtttccctaacaaaggaatgccccttccctccacaccccaagccccaaccagcgggacctggaggtagggaagacagcatgggaagcccagcctggattggaagcagcaaacatttgaccatcccagccacagggcatgcctaccctcttctctccctggaccctggcctcgcctaccgtggccatcctgctcccacactaatcagaaactttcccctggaaacccgtcctgggcccagcctttgtttcaggtcctcctcaagccaaagacttcctgatgcaagcgcttcctccctccagccagggtgaattctgccctgtccttagttggcttttcacattcacgtttccttgtgatgctgctactccggctatcagagtcgggggcagcagtgctgaggcctcccacccaaccccaaggtggcagcaacatccttcaagttccctccttccaggaaaccatctctggcccctcacttcacagcgtcctccctcctgttctgcacctggcatttaacacatactgccccaatcactgaggatgttgtcactgttggtaatacaaggaataacagcactgacaacaatcacagggtcaactatgggagagcaagaggttgagaaaaacagactctgcagtgattggatctggctcatctgagcctgagttttctcacctgtgaaatggggtcagtgtagcatctaccagccttgtgtagctgctggcagataaaattagatcaatatatatcaccatcagcactcagagggctcagtccctggggacaattgtggttattattattattattgttgctgctactacagggaacacttgccaaggccttcctgtgggccactaactgtgcccccactcttccagattcacacccaaaggaacagggtgctatgatacccattttgtggttgagaaaaactgagttccatcaaagtgaggagatgggttcaaggtaccacagttgggacctgaaaagccagcaatgcactaaagatgtgggtgacacaaggcttggaccctaacagagcagactctgagccctgagggtggagatcccagcctagttcacactgctgcacaacctggctgcaggaggacagccagtcttggggctctggcctcggacaacctgggctaatccttccaccttctagctgagtgaacccgggaacatcacttaaccttcttgagctcagtttttgcctttggaaggtgaaataatggtctctaccatgcagggggtgggggaggattagatgggtaagtggatggaaagcttgagcccagagcctatgcacagtgggctgctcaggaaggtagaatcatgcaagcccaggcctagaaattctaaagggcaggcacaggttccccacaaacatgaccttggcagaatccgtttctgagagttggcagcaagaagaagttgtatggatgacagaaattctcaaatttgcctattttcttaaagtggacatttaaaaaattccacattggggcggaggaatgttcttagcccagggattgctatacataggttcatgcatttactatgcgttggttcatctaagcccaacctcagggtctttgtatttgctgctccctctgcctggatcactgtttccccagtgggtctcttcctaacattctagtctaggcttaactatttgcccttcaagagatcttccctgggcaccctataaaaatgcatccttcacataaactctttctccttttccctactttgtttattcatgctgcttttactatctggcatcatattctaaatttatttgtttatctgtttgttgactgccttcttgtcttagcctattcaggttggtataacaaattgtcatgaactgggtagtatataaacaacagaaatttgggctgggcacagtggctcaagcctgtaatcccagcactttgagaggacaaggcttgaggtcacgagtttgagaccagcctggccaacatggtgaaactctatctccactagaatacaaaaattagccaggtgtagtggtgcacacctggggtcccagctacttgggagggtgaggcagttgaatggcttgaacccgggaggtggaggttgcagtgagccaagatcgagccactgcactccagcctgggcaactgagcgagactccatctcaaaaaaaaaaatttaaaaataaatttattttcacagttctggaagctggaaagtctaaatcaggtcatgggtagattagatgcctactgagggcctgctttctggctctgggagacttttagctgtgtctgcatatggtggaatgggtaaggggctgctctggggcctctttcataagggcactaattccattcatgagggctccactcccatgacgtggttccctcccaaagtccccacatcctaacactatgacatgggaattaagtttcaacatataaatgttgggaagacgcaaacattcagaacatagcactttcccattagattgtgaggataaggactatatctaagccattcacttctatatccctgttgcccactatatacctagcatacagtaggtgcttaataaatgtttgaaaaatgggtgaatgaaatattgtactttctaattcaagcattttctgagcacctactgtgcaccagggcctgtgctatgggctgtatatacagaaatacatcagtgagagtcctcagccctaaggccattggtctgaagaaaaaagagaaattgcaacaagtgccatagcaaacacagctgggaaattcactgatgtagtttggaggtgtgtctctgctcaaatcatatattgaaatgtaatctgcagtgttggaggtagggcctggtgggaggtgattggataatggaggaggatttctttttttatatctatcaggaatgcaaaattaatttaataatcgaaaattactataattcacagactaagacaagaaaagccatacgattctctcaccagttgcagaaaaagcatatgatagaattaaacatctttttatgattttttaaaattatactttaaattctgggatacatgtgcagaatgtgtaggtttgttacataggtatacatgtgccatgttggtttgctgcacccatcaacttgtcatttacattaggtatttctcctaatgctatccctcccccagccccccaccccctgacaggccccagtgtgtaatgttcccctccctgtgtccatgtgttctcattgttcaactcccacttatgagtgagaacatgtggtgtttggttttctgtccttgtgatagtttgctgagaatggtggtttccagcttcatccatgtccctgcaaaggacttgaactcatccctttttatggctgcatagtattccatggtgtatatgtgccacattttctttatccagtctattattgatggacatttgggttggttccaagtctttgctattgtgaatagtgccacactaagcatatgtgtgcatgtgtctttatagtagcatgatttataatcctttgggtatatactcagtaatgggattgctgggtcaaatggtatttctagttctagatccttgaggatttgccacggtgtcttccacaatggttgaactaatttacacccccaccaacagtgtaaaagcgttcctatttctcatggaggaggatttctaatgaatggtttcacaccatctccttggtactgtccccatgatagggagggagttcttgtaaaagctggtcatttaaaagtgtgaggcccccaccgcctctttctcttgctcctgcttcaccaggtgatgtgcctgttccccctctgccttccaccaggattggaaacttcctgagacctccccagaagctgatgccaccatgtttgctgtgcagcctacagaaccgtgagccaattaaacctcttttctttataaatgacccagtctcaggtatttctttctggcaatgcaagaacagcctaacacattcacctccagctactgcaagcattcatggggatgagtgaaaggaaggagagaggtggctgctgtgtcgagggtttgctctacgacaggatggtgcacttgccacctctggctcgatccacacactagcccattttacagattaggcattgggaactcagagaggtgaagtgacttgaccaaaagcaaactcatggcagaatgaagactgggaccagggaggcctaattccaaacattgtgtgttacctcctctaccacaaggcctctcttgcccaagagaaagaataaagtccagctaaagtgagctcaagcaaagaagatatagatatgtaattattatcattgttattactatttttttctcatgtaacagatacatcaaaaagtagaagccttcaggcatggctggatctagggtctcaaacactatcactagaactgctccattcttagagaggctctcaagtcaaagtgacaagacggctgcctgccatgccagcctcccctcccctactcccaaaagaccaagtccagagggaaaaagaatgcctcatagcaggccgttgaggttggctaatctggcacccattcccatcagcctcttcctgctacaaaggctgtgcagccaaacgtccacctttctgaccctcctgcagctgggtggccacaggacacagttctggtcaatgagacataagctgaagtttgtggtgagggagagcttttgctcctctgataacaggagcagttgtggccagagctgccccttcccatgttgccttgatcacagacatgatatttgaagcacagaccatcttgcaaccaggaggaaaggctgagaaaaaaaaagtcctcactattttttagccatgacattgttaagttgctggactcctaacttcagacttcttcctaagagaaaaataaacttccaatgttcaagccactgcattaaattccttgttacttgtagctgaaagcattcctgactaatacaactctctgtctcaggtccctataaaaaccctgggaaggcatcatattggttctaatggggtcatgctgtcattctgcaatggactgtggtggccagcagagatgggatgtgccaattgaccactccagtggccacccttaccacataggcttcgagtgggtagggttgttctccagcacaaaagttagtagagtagggaagtggtggctacactccctatacctctgaatcagtggaggcaataaattccctgttcttggcttaaagtttcttccatcgtttccaggaacatgaagatattgacttatttatcctccaggatttttatttggaatgtgaggggaggataattcagtgaacagtccaaataggggatcttcctgggaaaaaaggacaagtcataaaaactgcattgaatgccagtgtgcacaatgtcctttctgtgccccaagacagtctccctgcatgagttcttgagccagacagacctgagttcaaacccgtctccatcatgcaagtgcgtgggcagcctcgccatgtcacctcacctctctgcacctgcgtctctagaaccgggggtggaaggacccacttcaaggacccagtcttcaagaaagagtggaccaagtgcctcccccatggtggccctttgaccagcagcaacacccagagtgctttctctgtgaacccttccctgataatcccagagtcccagggagaaaatctgctcccatctgaagcaggaaccatccagcagtgagtgaacccactgccatttcctcctgccatgtggctaggccatattccacagcctcccttgcagtcaggagtggccacgtgccttagttccaatccactgcactccttcccctttgatgggtttgatgcacacaggtctgaagacctcagcagccacagtggaagatggcagagctgcaggacaccaggagcttgggtcctgaaatctttgtgcgctagagctgctcacttaccaggggcacccatgttgggcttttggtgagtaaggaaaaaacctctttggtatttggtgcatggtgcctcttgggcttacgaacgttacccacatgcaccgcttggggggcacctgtaaaagtctgcaggacggtcagcccgggaggacattccatgtgggcaccagcaaaggcagagggtgggaggtgaggaggcctgaagagccaacggcagccacactgtggtgttggaaccagattgtccttcagtcctcccgccttgactgccagagagcagcccatgatcaccatcacatcaagcctgcaggcagggtaagagattaataacaatactaacaacagtaataataggaggctctgccaatattcaagagaacttaccactcaccagctgcgggctggtttcttcctaggcctgatctcatttaatcctcaccatggcccagcaatgaaggccctactgatgtcagtcccattttacagacaagaatacagaggcccatgaggcgtcggaggacattctccaaagggcatgttcttgagctcagcttccttccagcacagcctttcatcagggcttggaccttcatcccattatatgtccagcattattcataggctgaggacacagaagtgaacaaagtagatagaaatctggacctcgaggggctgcgactctagtgggagaaaatgggcaataaacacacaaacacgtaaatatacaaaaggagtttggtgaaggatgagtgacatgaagacagcaggtcaggatgctgcggtgggtgaagggaggaggtggtgctgtgcatcttgaggttggaggaaacctctctgacatggagctgaaagtgctgcagcaaacgagtgagccacgtgaagatctggggcaggctgttcctggcagagggaacagcaagtgcaaagtgcaagtgctacggccctgaggctggaaggagcttgtcatgttcaggaacagaaaggagagagcagtgtggctggagtggagtgatggggggtggggagggatgaggctgcagagggagtgggttgggacaagtggcaagttttggtgggcaatggtggcaggggtagatgatcctccaaaaagactcatctggatgccagctctggggggtgcaaggagggtattccaatgaggagaggagacaggggtttcagcccaaatttgcctccccactctccacttgacttaagctgctcccctctcccttcctttctctcattccctctctctttttctctctctccaagtggaagctggatccctagggaggatgaggcccgggcttgagtccaggcaccaacaagagcgcgttcccaccctcccgaaggtctgatgtggagcagaggaaaagaatggtcctgatatcaccggaaaaagggtcttatcccatatcgcaagagtgggttcttggatctcacatgggaaagaattcagggtgagttgcagagcatagtgaagttaagataggattagagactaatcaatgacagagtagggcatcctcagaaagcaagaggagaacgtacccatttcaagtaccagtgcttgcttatataggcagttaagagtagtgtactctgggctcacccctgtaatcccagcatgttgagcggccaaggcgggcggatcacttgaggctaggagtttgggaccagcctgaccaacataatgaaaccctgtctctactaaaaatacaaaaaactagctgggcatggtggcctgagcctgtggtcttagctacccaggaggctgaggcaggaggatcgctggagccccgaaggtccaggttgcagtgagatggtgccactgcactccagcctgggtgacagagtgagactctgtctcaaaaaaaaaaaaaaaaaaaagaagagtagtgtattctgttacaaaggcttatgatcagcttgtgacaggctactagtattgctactttcctatgttactattgattttagcaagaatttatgagtgtactattatctttaaagcaaaacctattattttatttttatttatttatttatttattttttgagatggagtcttgctccatcacccaggctggagtgcagtggcgcgctctcggctcgctgcaagctccacctcccgggttcacgccattctcctgcctcagcctcccgagaagctgggactacaggcacctaccaccacacctggctagttttttttgtatttttagtagagacggggtttcaccgtgttagccaggatgttctcgatctcccgacctcaccatctgcctgcctcggcctcccaaagtgctggaattacaggtgtgagccaccgcgtccggccgaaacctgttcttaaactaagaatttttttttgttcttaagatattgggacattttcataagttctgcgtctttaagtaacatcattaactcgttccctcaaccatgaacatcttgtaaccaagcacgtccacgcccctggaaatgtaacccagcaggtttggcttttctgcctttattcaatatggagtcagtctggttaggatgcctttgtccctgagagtcagtgccctcacagcccctgcccggcctctaacttgctgtgtgacctggagctgatcattcgctctgggcttcccttttctcctctgtttgaggagggagctggtctggtgccaccattttccagctgtctgtccttaggcaaattattcagcatccctgtacctcagtttcctcatccatgaaatgaggatggcccagttccaggcttacggtgaggattaaatgcacagtgcctggtctcagtggctgctgggaattaccatcattactgttgttttgccattctattgctattgccagtgttgctattagtattcaaaatgcagattggtggctgggtgcagtggctcatgcctgtaatctcagcactttgggaggcagaggttagaggatcgcccaggggttcaagaccagcctgggcaacacggtgaaacctgatctctacaaaaaaaaaaatacaaaaattagccaggcatggtggcacgtacctgtagaccttacctgaactcaggggggttgaggctgtagtgagctgtgatcgtgccactgcactacagcctgggggacagagtgagacgctgtttaaagaggtttattctgagccaaatgtaagtgatcaagacccgtgacacagccctaagagatcctgagaaaatgtgcccaaggtggttgggttatagcttggttttatacattttatgggtacagaagttacaggcagacattaatcaatccatgtagggtgtacattggttttgtcgggaaaggcaggaagcttgaaaagtgggcggcttccaggttataggtgaattcaaagattttctgatcagcaattggttgaaagagttaagttattatctaaagacctggaatcaataaaaaggaatgtctgggttaagataaggggttttggagaccaaagttcttattatgcaaatgaagtctgcaggtagcagccttcagagagaatagagggtaaaggtcccagactctttgttaaatctctcctgcatcaggaaaagacctggaaagggaaaaggattctctacaggatgtagattttctctacaagagacagagttgtagggccatttcaaaaatatgtcaaagaaatatattttggggtaaaatacttcaatttctttcaggtcctgctatctgttgtgtgatgctatatgaggaatttggtatcttattgctacaaagagcatgctttgtcagtcttaagctctctctctctttttttttttttttttttttgagacagtgtctctctctgttgcccaggctggagtgcagtggcactaccttggctcactgcagcctccgcctcccaggttccagtgatactcctgcctcagcctcctgagtagctgggattacaggcgtgtgccacctcgcctggctaatttgtgtatttttagtagagatggggtttcaccatgttggccaggctggtcttgaactccgaccttaggtgatctgccgccgtcttggccttccaggcgtgagccaccacgacctgccaagctctctgttttcatgataatgctggtcaactgtgcctgaattccaaagggaggagggtatgaggcatgcctgatccccactttccatcatggcctgaactagattttcagggtttgttgggtcccgttggccgagagggaggtccattcagtcagttagggggcttgtaattttatttttggtttacagttctgaggccccttctggctttcagactggcctggttgcttcccatctggtcacctctctgtcagtgttggggatcagcattcatctaccccacggatgttctgcctggagtgggggtgggaaatgggactggacctctcgccatgggatgcagccaggccctctctgctcaagccttccagtgctcctcacccagacacccttctgcagggaccccagttttactcccctgaaaaagaaagtttccatcagtaggagaagacaggacctgaaattgtccctgagcctacatgtctactagggtagatattttgaaagccggagagaggaggaagcagacaggaaggagacgaaaccccaggactgtctgctaactccaggaggactggtcttcagaacccaggggccctccgcattccttctgcctccctatctcatcgtagctcctgccccatccccccaccacttctctcccctttcctaactgcgtgcccttctctcctccagtccagcccagccctactgaagaacagcaacttgagctggtctttctgtgctccgcttgattaaaatgtagaaggcacctctatccagaagacttggcttggccctaatcactcccagcccccttggctgagtggccacccgctgctggctgctgtcatcccacattggaagtgacggaggagcagaagaacgagtgggtcaccagccggtcttcaggctcccgggccagcattcagactgggcaggaggtttgtgggtggaaggtgagttgggcagcccgtcagccactcctcagggctggacggaaatagtgattaggagcatggggtttgatgtcagatggcctggggttgcagcctaactttgttatttactatctgtgagttaagccctctgggtttcagtttctccatttgtaaaatgggactgatattggaagatgtcctacttagaatggcgcctgagccatcgtaagccctcagtgaatccactgtaagacttcagcccccagactcccactgttcccttgccccagcttccctgcacctctcctgccacttccctcaaagttgctctcagtcaggccttgggagccacaatctgggaacgaggaccctgacatccctcttcacagctgtacccagcaccaaacaagtcatcagaggttcaaaacacggagcccctaccatgtgccaggcacggcatggcatgcctgctctctttctaattttgataccgcaatgattaattctgtgaaaaaagttctagaaggatataaggcaaagaattaggttgtgttccgtccattcactcacggctctgctcccacgcatggctgcgctatgcacactgccctgcagcttcctttgtctgctgcacaatgggctctggacggagccctgttggcgcaatgagtgagccctacatcaagcttcgtcatcgctgcatcgctttgcaccgtgtggctgggccgccatcagtacagccaactgcctctgatggacatctgggctgcagccagattcctcctaacagggcttcagggaaagtcctcctcagcgcctctttgtgcgcatggcacatttctctaaggcaggtttctggacatgagactgacgggcagcatgtgctccttacatttgggggtcctgtcaatcccctcctctcccgcaggctgttctagactccagcccccatgtgagaggatgcctgttgccctcactcttccatcctggcagtccccagcctccttgcctctcttgttttcttgttccgatcagttccaggtggccagagggtcgagactcatctcacagccgtgcaatagatgcgtgtctctcagtcggtcagctctggctgggatcagtgtttatcttcatgtcggtggacaccatcacaggcacccgcaagaatcagcgatcgacggggaagaggtttgggtgcatggaggagtgctttgcagtgagggctttggagccttgtgccctgattcaaatcctggctgtgtcccctgccggttgtgtgacttcggataaattacttgatgtctctgagcataagctgggtcatcagaaaagccaagctagtaagagcacgtagctcagaaggctgctgtaaagttcagatgagttgatatatgctcagtgctggaaagggtgctgggcacattagctgttggtattatttgggcacctccagcccaaataataataaagagactaggagggatgttgggagatatcagatgttgctcattggaggctgtactgagtgtgcagagagcttcagggaacctggagctttgagaggtaaaggaacgtgccaactggaactagaaacccactgccgcctgcagctctctgggctgtttctccacatgcaccgtggggttgttcgggtcccactggggagggtggctggtatgagggtggcctggcctggatgtgaagtgggatttccaaggctggcactcagtccagagcacgagccttgatgaggaacagatgcactcacagtctggggtcgccgccctcccctcctccacagcccagggttggggtggcgatagcttccagatgggcttggctcttagtggggccttaaatgactccctctgagtccctgagaggtgggacttagggcctcttccttggttctcaacccccctggccctgggggatacctgaggtagctgggttcaggccaggtgaccttgggaatgccagccctgctccgagcctcagtttccccatctgagaaacaggcattctccatcaagctggcttggcagagccactgtgtcctgtgatagctaaagagaaacatgaaggaggaccaggaacccccaggaaagtagggtttctttggttttattttctttttgtatttactttctgaatgtatagtacatatccatagcataaaatttcaaaggtacaaaaggggtcataggtaacagtaagcctgtctcccacccctgccctccagacacccagacccctcttccccgaggcaaaaaccctgtcaccaatttcttgagaatctgcccagagatacggtatgcacacataggaattttttacccagtgatgacaaacttcacacacagtatttcacactgtccttttgttactttaacaataccctttagagatcttcctatgtcactccataaagtgcttcttttttttttttggatgcttggcgaagatggtttcagaatattacacaactttcaactgaccaatcaggatgggcccgagcagtgcacaaccctacagtagtatatggctgctagctggatgccagctctgtgtctttatggttcaccattgcatagatgggccaattgcagggatgggtaatttataaaggaaagagttttaattgactcacagttccttgtaactggggaggcctcaggaaacctacaatcatggcagaaggggaagcaggcacatcttacatggcagcaggcgagagagtgtgtgaagaagcaaagggggaagagccccttaaccagtcttcaagagatgagcaggggctgtttccaacattttgctctttaaaggaaggttgcaatacatacccattttgtacatttgtaggagaatatatgtagaataactttctagaagtgaaattgcattttacatccatatgtttaaaaaaatatcaatttccaccccctgccatatacaagaattaacttgaaatctaccataaatctaaacgtaaaacttaaaactgtaaaacttccagacagcaacatggaagggaaatctttgtgaccttgagttaggcaaagatttttttaggtactacacaaaaagcataaaccgtaaaagaaaaaaagataaatttgacttaatcaaaattcaaaacttctgctcttcaaatgatgctatcaagaaaatgaaaagacaagccacagattaggtgaagatatttgcaaaagtcatatctgataaaagactcatatccagaatatatattgagtgctttcacaactcaataataagaacaaataatccaataacaaatgagaaaaaggtttaaaaagacatttcacccaaaaacagatattgatggcaaaaacacacatgaaaagatactcaatgttatcagtcatcagggaaacatatattaaaaccacaacgggctaccactacatacctgttagaagactaacatgaaaaataactgataatacctggagagggtatctaacaactggaacttagaaaaacagtttggtaatttcttataaaatgacccagctgtcctactcttaggtacaaagagtaatgcaagagaagtttgtgttttaaaaagaaaaactgtaggcaaatatttacagcagcttttctcataatcaccaaaaactggaaataactgctgtatgagtctagtctcacacagctataaagagactactcgagatgggctaatttataaagtaaagaggtttaattgactcatagttctgcatggctgggggggcatcaagaagcttacaatcatggcagaagggggaagcaggggaagcaggcacgtcttacatggcagcaggtgagagagcgtgtgaaggaggtgaaggggaaagagtcccttttaaaaccatcagatcttgtgagaactcactcactatcttgagaatagcatggaggaaactgcctccatgatccaatcacctcccgccaggttccacccttgacatgtgggaattatggggattacaatttgagatgagatttgggtgaggcaggaggatcacttgaacccaggaggcagaggttgcagtgagctgagatcgtgccactactctgcagcctgcagacagagtgagactgtctcaaaagaaaaaaaaaagaggtaaacaggtaaagaaaataattttagatcatgataagagttaggaagaaaacattttcaaggcactaaatagagaatgatttggagggggtacgatatttaaagaaggttatcagggaaagcctctctgaagaggtaacatttgaactgagatgtagagggagagaaggaactagccatgtggagatctgggggaggagcattccaggcagaggggatagcaagtgcatctgaagaggtaacatttgaactgagatgtagagggagagaaggaactagccatgtggagatctgggggaggagcattccaggcagaggggatagcaagtgcaagggccctgaggccagaatgagtttggtgtttttaatgaaagaaaaaggccagtgggtggggcaaggaggagagggcaggaggtaaggtcagagaaggaatggggaaagtctagcttgcaccagccctgacatgggacgagacaccctctatgccctcggtcctggcggctcctgcttcctcctttgtgtccactcaacatgatgggtgggcttggccatccgcagacccctcttgatgccccagtaccttccctgccccgcccgacagtgaggtccagcctcctgaacagctcctcttgcttgtcattggattaatgggcaggaattgcttctgctttttcaaagccattgccccctaccacagtcccctaagatcatgaaggtgcgagcaatcatacttgaactgttggatgatgaatgcatcactgttgatgtggaggaggctccccagtgtgaggactcagagcagggtctcggcctctcacagacctggctgtgtgcttggctccacctcctacgacctagggccctgagcctcagttgcctcacctgtaaaatgcggcaaacaagcaagcaacaagatgctcaacctcagtagtagtcggagaaacaagagctaaatagcagtgaggcacaccctttacctccattccctggattagcaaatagtagagtcaggaacttccaagtattcatgagggtgtgggcgatgggaattccatgttctgctgctgggtgtttggactggtttagtacctaagagcctaagaaagagtatatctgatgacccaggcattttcctcttgagtgtataccccagagaaattctcctgcagctccagaaggagcccattcgaggtcatgggtcactgtgatggtgtttgaggatgtgagcagtaggtgagaatccatgtagatgccaggaaaagcaaactgcaggggcctctaaaaaataccagataagggatgagtgcggtggctcatgcctgaatcccagcactttgggaggctgaggcaggtgcatcatttgaggtcaggaattcaagaccaacctggccaacacgatgagacccaatttctactaaaaatacaaaaattagccaggtgtggtggtgcgcacctattatcccagctactgaggaggctgaggcaggagaattgcttgaatctgggagactgaggctgctgtgagccaagatcacaccactgcactccagcctgggcgacagagtgagactccatctcaaaaaaataataaaaataaataaataaataaatacaagaataaaatgaataaaaaaccagatgaaaaagaaaaccaaaaagtaaaaataaaaaacaccaggtgcatgagagaaaaaaaaaatagaagacggggaaatctgtagcacacgaccatttctgtgattttttttttttttttttttttttttttttttttttgcgacagagtctcactttttcgcccaggctgcagtgcagtggcgcaatctcggctcactgcaacctccgcctcctgggttcaagcgattctcctgcctcagcctccggagtagttgagattacaggcatgcaccaccacgcccagctaatgtttgtatttttagtaaaaacggggtttcgccatgttggccaggctgaactcgaactcccgacctccggtgatccacccgcctcagcctttcaaagtgctgggatgacaagcgtgagccaccaggcccggcccatttctatgaatgaaaaaaactcacaagctacagaacatccctacacgcgttaaaaggattcacacacattcaagcccagagaacagactcacaggagcagatgcctggggggagggggaggggaaagggcagaagagcatcaagagcgaaatccaattcaatccaactgtgcaacagacagtttgcagaattgatgaggatgtttaacccaggtcttggcaccctaagtccaagtaaaaaaataaatacgatacagcaggtaaaatgggggatgatggaagggtggcgatagtagtgcctttctcatggggaaccctcgaggctccgatgagcgaaaccatgcagagtgctcagccaggtgcctggcacgcagcaaggtgtccggtgcacagcagggccgcccagctgtgagcggtgcgtgtattctctccagccttgaattcaggcctggctccttctgcttcctggtcagtgccgctctcttgtggcccatacagtgacaggacttagactgaatagagatctgccatggtccaaggtatctgatggcgcttcggaggagggaagggagggagtcacatgggggagataggatcaccagaggcagatgggatcacaggagggagatggggtcacaggaggaagagtgacttccgattggggaagagatggcggatcagataaggcctcctggagaaggaatgtctaggctgaaggacagattcgactgggggtcaaggggattgatgagcaaatgaaagaatgaatggagttagaatattgagcatgagcattacttagccctactgtgtgccaaggctttacatgcctcatatcatttcgtcctctaccacccctgggaaggcgacttattgcttctgtctcctttgcagctgcaaaaagggaggctcagtgggttagcgactcatccaaagtcaagccgccagctgcacatagagctctgatacacacccaggtcgtgtgacttgctgggggactctatcttctccactttggggtggactgagggaccccagtgagcataggtacagaccacccctgagtctgtctggaccatgtgttagcagaagtttaatactacacctgtgcagcaggtggagatgggtgggacctgtgtggacgagaggaagtggatcttgggacagctacagcatgcagcggctcaccccagggctggaccctcactctttggcaggcagctggggcaccacacccaggggttaaatgtggagactcacttcttaagctaaaggatgtgtctgtcttcaaggcactctccgaaaaatgcctcattttggaatttatgtcaaagccatttaaatccttattaagagtatttaaagatcagttttcaaaatgtctcctaagtatttcatttttgtttttctcgacttggtagtatattcccatggctaaaaattcaaaagggaccaaagataaaggtaagcctcctctctttccatccactctaacctctccccacccagagccatcactgttactggtttctagagtgttttgtcacctgtaggttttgtgcattcatgaatcgtacacacgtgtattttccctccttcccgtccccccgcgtgggggcttactatgcgcgctgttctgcaacttgcttttttcacttggcaattcgtctcagggactgccccgtcattgtgtcaaatccttcctcgtggtgcttctcggccatgcggtgttgcactgagtgctgtgacattgtatcgcaatgcctgtcctctagatatttaggatgtttccagcattttgtgatcatacacaggactgcagggaacagctgtgtaagcaggtacacttgttctgcagcatgtgggccaggctaattgttatttatttatttatttatttttgagacagaatctcactctttcgcctaggcgggagtgcagtggcgctatctcagctcactgcaagctctgcctcccaggttcacgccattctcctgcgtcagccttctgagtagctgggactacaggtgcccgccaccgtgcccggctaatttttttgtattttttaataaagacggggtttcaccatgttagccaggatggtctcgatctcctgacctcgtgatccgcctgcctcggcctcccaaagtgctgggattacaggcgtgagccactgcgcctggccctgggccaggctaattggaggatgaatccctagaggtggattgctgggtcaggggacatgtgcgctgtgatttgaatagatgtcaactcaccttctgtagaggctgggtcaagtcaccctctcctgaggaaggtaggggagggtggcggcttacccccacccagcccaggccctgtggtttcattttctttttttttcttttttatggctcttagccaatcagataggtggaaaatggtagctctgtgtggctttattgtcatctaatttgagtaagggtgtttggagttccttttctggatgaggcatttttgccacacggggacagcgctgagccgacgacacggcagtgccgctctggacacgctgattctccctgaggctcatcttctcaggctgagtgggactgtgcctgtggatgcccgctcatggagtagtcgcctggtggagggcaagggttttgagttcccattccactacttactttctgagcctcggattccccctctgtaaaaagtggaaagaataatagaacccacttcagatggctctgaggaggatgaatttaagtttttaatgtgaaatgcttggcacagttcctggctcagagttagtgcttaggaaatgtttgttgaatgaagaaatgaaagagatataatcatcttaaaaattgtattgagtacttattatgaagcctttctcatgtattcacgtattttaacttcacagtgacaccaagaggggtacttttattatccccctttaaagacaagaaaactgggccgggtgcggtggctcacgcctgtaatcccagcactttgggaggccaaggcaggcgatcacgaggtcagattgagaccagtctggctaacacggtgaaaccccgtctctaccaaaaaatagaaaaaattagccgggcgtggtggtgggcacctgtagtcccagctactcgggaggctgaggcaggagaatggcatgaacccgggaggcggagcttgcagtgagccgagatcgcgccactgcactccagcctgggcgacagagcgagattccgtctcaaaaaaaaaaaaaaaaaaaaaaagaagatgagaaaactgaggcacagggagagatacaggatcttgcctaaaggctcatagctggcgtcactggcggcgacgggattcgtgatcttctgtctgctcttacccacctcacttccctgcctcccactctaggagagaggtgccaccataaaccccattccagctgtccattgcatgaaacaacctcctcaacctcagaggcataaacaaacaaccattttatcatgttcctgggttctgtggatcaggagttcaggcaggataaggtggacagcttctctctgctgggccttcgatgggaggactctgtggctgggagggttctgcagtggggggtaaggaggggcagcgggtaaaacagcaaggactagaagacccacttgcgagaaggcttcttcagctacaagtctggctggaggatccattccaccttgtggatggtaggttggctatggctatgggtgagggtgggagtcatggggggctgagtgggagccatcagaccccagggctgagtccacatgttccaggatctgacagcttaggaggcttagcaattccagggctggcgcccccatgaatagcttctccaggattttgcaagtgctgtttcctccccctccccacccatctcattaacacctcgcactctttaattctcagcttggctatctggtcctggaggaggagctccctaacccctgtatgccttagacaggatatgctagatcctgtcctcatggaaggtcttatcacattgttggaattgactgtctgcagactgaacgcttggaggacaaggcagggtctttatcaccagcacccaggacagtaccaggcacacagtaggcactttatgcatattcacggaatgaatgaatgggtgagactgatggattttgaatgacttgaacttgagcctcagtttttcctcctagaagttagctggcaacgtagctgtgaaggtggcaggagataggtgggaaatgcgaggttagtaagaggaattggtagaaaaatggtagttatgatttatgctgaagagagaaaagcaaaggaaattagatattgcacctgaaatgcttagctatgtttggtgcagaataggtgctccataaatataagatgacgtcatcatcctcatcctcatcattactattatttgtattataagaatgcacatttcctgagttagaaggtccacatacgatggcttgaaattttcctctgggctgggtgcggtcgctcacacctgtcatcccagtactttgggagactgaggcaggaggatcgcttgagcccaggagttcaagaccagtctgggcaacatagcaagactctttctctacagataattttaaacatagctgggtattgtggtgtgcatctgtagtcccagttacttgggaggctgaggtgggaggatcaactgatccctgcaggtcgaggctgcagtgagccgggatcatgtcaccgacctccagtctgggcgatagagctattacccatcttaaaaaacaaacaaacaaagacagaaaaaagaaattttcttccaagcgaaaatggagaggtgtaatccccataggtcacctgggccagatgtctgggcaggaggtcatgctctgagtcagatttcccttctgtgcaaggaaggacctgggacagggacctctgagtctgacactctctgcacagctgagaaggccattcagctgaagtccccattgcaactgttgtccttcagcctgaggcagtcagtccttcggtctgaggcagcctgtcccttgccctcggctaccctccaccctgctccagtcctgctaggagagaaccgcaacacgaccccgtttcagaaatgcgctccttgacaagcctggctgcgacctgttcctggttgactgccgtcatccggtggcagcatgtgggaatgacatgcagggctgtggtgaggatgaggatggagtgagcgggtggggggaactgcagagagggccctagtgtggcccagttggaagcggtgacaggaagaacccaccagggattcctcagctctggccaaggggttgttctctccctctggcatagcatccagaaggccaatagcagcggaacctccccctgggctctgcccagactgcctctctttggctgtgtgacctcaccctgtttctgagcttctctgtgaacttctccaagcttggcttgtaagaagggagtgggcgatgcccacctgacagcagagtctccttcccagagaggcccctcaatcctccagagaatgtgggagaggctgggatttgaaaggattggagctgggggcagggaacgtctgagatggaaaggttataggaggggcttaggccctgaagaaatttcatcctgtaatttgaaaatattaaaaaaccaccacagcccccagctgaggacagaggaccaggccccccaagaagaaagaacatggccagggaattgcagtactggaaacttctacccttatgttggtcttttagaattgtgaaaattagaacgttcagcatcctaaaactggaatcttaacagaaaacactatatagtgtatgtatgtgtgtgtgtgtgtgtgtgtgtatatatatatatatttatatatatatttatttatataggggctgggtacagtggctcatgcctgtaatcccagcactttgggaggctgaggtgggaggatcatttgaggccaggagttcaaaactagcctgggtaacatattgagacccccatctctacaaaaaataaaaaattagctgggtgtggtggtgtacacctgtagtcccagctacttgggaggctgaggcaagaggattgcttgaggccaggagtttgaggctgcagtgagttgtgatcgtaccactgcactccaacctgggtgacagatcaagaccctgccaaaaaaaaaaaaaaattaaaaagatacacacacatacacacacacatacagactaaactctgtagaatcagatcattgagccttgaggtcagaatcagaattgcagctgcaaatctagactcagccctctgagctggaagtcatctgagagccacctctcccctcagcttgtcctggaaagaatgtttgctctcactgcctgctcctaaacttgtttgcaatgaatagatctgggggagggccccaaaacctgaatttctaaaaggctccccaggggattctgttgttgggtcttccagatttcggcaatagatttaatttagccaggcttcctcttcatcacattcatcacatgggaaaactgaggccccggaaggggaagtgacttgacctggaccccatcagatagctggtgacaggctggagctcccacctgtgcctcccaatgccaaggccactctcaccagcagcccagggtgtttagatggccccgtgggactgtcaacctcctaggtacccctggtccctgagacatctggttcgtgaaactgcgaggttctggggatcgaggtgtcaccctcttctgcctctggctgagtctgcttcttgagagtagcctggaggggctgagggcccctcctcttttatcagctccccccaagctgaaaccccaccccaatccccaatacactctgacccctctcagccccaagcattcctgtgaaaaccactccacatgttttaaattctgctactccaaactcagcagtatcatggttttgcaacaccctcttgatgctcaagaagcatttacaagtttcttttccctttattaagaaagttttaaaaaaaagttagggtcttgaaacaataacaacggagcatttcagaggcacaaacgtttgcagaagagaagctggtggcctggccaggcggaggagggggctctagctgttctcggggaggtgagagcagggaagtcagagagagggtgggcctgctgggaggggggggttcaggccagggctccccagctgccaggtggagggcaggtctgagggtgggtgctctcttggggtcgggaatgtaatatttcatcacctagagcctctcccccagcctgctgaccatcttccttccccaggccacccctgggccccttggagctccgactcttgcttctcctgcccattcctgtcccagtcacggagccctacgtgttcaggccaaccagtcacggcaaatacaaatcccgtttctgaggattccggggagcagagcaggaagggggtgttatgatggcagaaggataggcagtgaggacagacttgcttccaagctgggtctgacctggagactcctcccagcgtcgttcctgcctagggcgaggggcgtcacagcgaagcacagatgctcaagtcactggtggtgggtgtgggcgagtgtggtggtgggtgtgggggagtgtggtggtgggtgtggggcagtgtggtggtgggtgtgggcgagtgcggtgatgggtgtgggcaagtgtgggggtgggtgtcagcgtgtgggggtgggtgtcagcgagtgtggtggtgggtgtggacgagtgcacggatcttcccttgctccccacccacaattccctacatttcccccctcaagtgacccccaaattctcctctccaccgtgaatgtgctgagcagagccatcaggcagaagcagagcctgaaggcttcctgtgtgaccctgggcaagccccttccttctcagacctgtttccccacatgggcaggaagcgctgaggtggggaacagagctgctggataatctcagctttcctttccgtttcagtggcctcttctgggctgggcaggtggatcccccagcagtgacagctcacctgatccggcttgggaaaaaggggcatggaacccatgagagggaggcctgtgggggagtgccgatgagggtggcaggcagcttgcagaggatgccctccagggctggctgcccacccagaggccaggttgtgaccctccacggccagctgggggaggtgtccaagccaggcctctggaagccctggagccttgtccagccagctcctcggggtggctggtggctgaaggctgtggaaatggcctctggggactgtccagagaaccaggtgctcacagctcagggtcctggagcctcccccagagcagaagcagggccttcaggattcacctgtgctgtgtcccagctttgccctctggaaaccctttctctgcaaagatggggtcagggaaaggcctgggaaaagatgtttgctttctttaagttgtagatagagaaagctgcaggggagggcacaggctcatggtccctcttaaagtgtgtgtgagagggagacaagaggagggagagagagaaggatgcggtgaaggacaggaagaaacacaggaagaaagaaaaggaaagataaaagataagtgagaaagaagaggaaggaagggaaggagggagggagaaaggagaggagaatggaggtggaagaaataaaggaaataaaaaagaaaaagaaagggaaggtagactgacagaaaaatgatagaagggtggaaagaaagagaggacaaatggagaagacagaggagaaagagtaagaggagaggaggagaaggagcaggaggaggtgtgcaggggccgaggactaggaccagagagtcgggagagccggcggtcagggctgcaggccgggctggcgcggcctcacgtccagcctgcggtccagcttcctgtccttgcgtgggcgccggtccttcctgcccttcttctggccggggctcctctctgcaatgagaggacagagcccggtgaccaaggctgcagggccagttaggtcctgggagcctcctcagtcctgaaagacaagggtgccccacccactccccaacaacggggctcagaacatttgggcactgaccttgcagtccctcctgttgagagtttggaccgtgggctaaggtaccccaaactgaacctttctctctaggtcttcagggagtggcgagggccactaacttgttcagggccttcttgtgctggacatctggctcggccaggcctgcaggttcacctggggccccccaatcagcatgtcgggtggcctcatgggagtccccatggctttccccggcacactccttccatagctgagcaggctctgtgctggacgctggacacctttcatctgtgtccctgcaccaacttctgcataacactgtggcaacaatacttcagcatttagcaagcgctcactgtatgcaggccacagccccaagtgctttatgtatacgaaactcacaacagccgagagaggcaggtagggtctgagccacacccagtcccgtcttctccaattgtcctctctttctctccacccttctatcatttttctgtgccaggctacctttcctttctttttcttctttatttcctttattccttccacctccactctggctgtgcccgctgcccagggagttcttctgagcagttgcctgtcattgttatggacaggtgagaagaccacagcatggttgggagcaaggccagccctaagtttctgctttacaaagtgtctccacacccaggacattctcctacattgcttgggccccattcagttccccgcaaggagctgtgtgtccatttgaacacgatgaacctgaggctccatgagtcactttctgaaggtgcgcagcgaggctgttagagaccctctgagcctagtggcaaggggagggcagttttattccttgggtgtcaactatgtgcccgtctccccaagagtcagggctgtggctccagtcctggctccttcctctgcagagcagagtcaaggagctaagaccaggctacccacctctggggctccccacgcccactctgagctcttggggagcactgaggccaactcccactctgagctgcagagctgactgtgcaggcctcaggtaggacagcatctggagatggggtgtgggtgctgcctgagtggccctgccggctctgatgtgggggtgtgggggccagtggctttgtgtccctaccccttccctaggcctgcctgccagctgctcatgtacccatccagtcacccacccatccctccacctatttacccacctacacactcacccacctattcacccatctactcacccacctccatacccaatgacccatccatccacctaggcacccacccatcacctatccatccacctgttcacctatctacctacctacccacccacctaatcatccacctacctactcatccacccacctaccctcccatctaccctcctatccacccatctacctacccactcacccacctgtgcattcagccatccatccactcatccaacaaatattaactggataccgactatgtgccagactgtgttagaggcactagagagacagctgtgaacaaggcagataaagcccttgccgtcactggagatcacactccagtaaggaaaacagacgctgaacaagcaaacacgagaatgagaaggctcatttcagaagggtgcaagtgctaccatgtgatatgatggaaaatgactccggggagggggactcctgggaagcctctctgaggaggagccactgcagccaagacctgggtgatgcagggagctacagcggggttgttgcgaggattagagtcatgtttcacagcactaagcacagccagcacatggtagatgctttatgaatgtttgcagttattgtgattattattatccaggggaaaagctttcccctcatgattccccaacagccattcacccccagctcttggagccatgagaggtgccatgtggtaatgagtgcagaagaactgtctgcctcctgtgtgagtcctgctctggctctggggtctcttaggttctctggttccacctcaacctcactctgtcctcacctgcccaacatgactcccaaaggctcctatctctgctagctgcactcccaacccaaatagcacaagtccttctgaaagaggagtgtccctgagttcaaatcctggctccactatgtcccagctgggtgccccgggtggcctggttccaggtccctcatccttcatcatgactttagattcctctttgcatgacgagttacgtttgaattctaggtctacagctccctggctttgtgacccttaggtgagtgactcaacctttctgggcctcagtcccctcatctgtaaaatggggatagtgctaataacacctaccgcatagcatcactgcgaagattacatgagttaacgattatagagaattcggcacagtgcccagtcaacactgccaatactactcaccgttcacatcttaccaagcacaccctgtggcctctcttctatgtaaatcagtggtccttcatagcccccagaaacattttggaaatacgtgtagtggtcttgaatggcacagtgaagggggttcctgtggcattcagtggacggcaatcgggatccagcgtgggacagtcccccgcaaagacgagctgtccccctgttccatccagttctctcacatcgtgccccaccctcacgtagctgaaaagtctgcttgctgggagctgaattctgtttgactcatgaataccaattggtttcgaacacttccattcactgaagattctagggcactgtgagtgtggtgtcaatcagagatcaattgggttggaccttactaatcattggtcactgttgggaaatcgcatctctgatggcgatgtggccacgtacttggggcgctgaccacggccgcggtcctcactgggattgtacttccctaagtgtctgttggtatgttgggccaagcgcttccatcaagaaatttcttttctttctcctctatattacagttaggacactatactgataaaaaaaaattacctttgcaagtaggccacattctccatgaacttcattaagaatgataaagagggtattcccaaatccttcttattaaaaggggggtgttcagtttgagagggttgggaactcctggccagctcaattttcctaatgtatttgggactgaacccagcaaggaaggccctcctttgaaaggacaccagggaaggtgatgtgtactccacatgatagtatggctaatggtggcctttcaggcagtctcatagatactatttgtggggcagtgatctgagtccgccctgtccctgtgggcctttcccaccgcagcctcgtgtgcctgtcctggggctcacctcctgggcagggcctctggatgggacatttccttgactcagaaagcacctggcaggtggctgcctcctcatgcccagcccggccagcctctcgtacccggctctccaggccccaagccgagccgcaggtctttccattgtgtgtgcaggggctccagccgccccagggacccagttcacactcccctgtggggtgaaaggagagacagacagacagacagacagggtcagccggcagtgagggtccttcagatccaagggcagggtttgaggggttcagtcctctgaagactgaagacaccacttccacctgctaggagcagagttatttataagagcctggaatgagagcgaaacgaatgcatgcacagactaatatgggcctgaagccagagcggccgactgtctagctttaaaggaaaggcttcctggaggaggtgatgtatgagttaaagggagagaggggagctcgtcaggtgagaagaaggaagcccattccaggcaggtgtgcaaagccttgggagcccggcccaccatgtttgggagatggggcagcctgagttgggagtcaagtctcaggaaggcggggacaggagaggaggctggaaggttgcctgggaagccctcaggaccaggacacaggttttaaacttgatcatgtgtctttgatcaactttggaaggaagaaaaaggaggccatggacataaaagttcttcatagggggtaataaaaatacatatatacatgtatatatatatatacacacacacacacatatatatatacacatatatatacacacacacacatatatatacacatatatatacacacacacacacatatatatatacacatatatacacacatacacacacacacacacacacacacacatatatatatatatatactttgattattttaaaagtccatgagaagtaggcacagaatatgggtagctatgaatactcctattttgtagatttggacactgagacctagagcagaggtttgctaagggaacgcagcaagaggctcacacagcagacacagcaagctcaagacacagtgggacccagaccttgctagatacacacatttgacaagtaaagactgagcacccagtgtatgccaggtgctattctgggtgctgagggagcagcagcagacaagacagcccagggtctgcaggcctcctggaattcaccatctggacaccgccgtgatgagggaagtgcaggcaccgtgggagcccagaagcagcatgggttgggttgtaggggaggaaacccctggactgggtcttgaagtgggggtgggatggcggggaaggggagcctagccaggctcagggagggacgggaggtgctccaagtgagggcataaccccagcagagtccccaggatgatttggcctggaactgggcaagccggagaataagctcaaactgaggaggaaaaaaatgatgggggtggaaaggctggcagatgggacagattgcccagggcctgggtgggctccgcccaagggcagtgggagccactgaagggtcctgggaggaaaagaaattgagcagactatcattgtgaaatactccctctgctgttgagtggagactgggctggagggactgagaaccaaggcgggagacgggcaggagctgtggccagaaccctggcgataggcagggggtggcaagagggtgggaagagggcggcacagaggacagaaacaaatgggtggggagaaagggatgagctgaatggtgtgggtttgggagcttcgtgctgcttcattttcaccccaaagttcttcctaccacccaaaatattatgcatttgttctcaggtgtcgcttctgtctctccactgaaatgtcatgtccttgagtgcagaggctttgtctgttttgttctgtaatgtgtctccagcacctaggaaagtgcctggccatagcagatgctctagtagatattttcagagtgaataaatgaacagattggattgaatatagggtgagggagagagaagagtcaacagcgatgtctgcatctcgcgcatgccacccagggatcagggagctggttattgaaacccagaggaaacccagagggagcgttaggtgggggatggtggcagtgggagtggaaagaaggcacccagagggcagtggaggtgaggatcagctgctcagggaggctggagacacggagtcaggggccatcagcagctggaatgaccatgaatgtgagcccggagggaatgcgtgggcagagaggcacagtgtagatgagaatgccaaggagcagcctagtgcaggaacgggagggctcacaggcaggagtgtgacaaggagctgttaggaaataatcagagcagtaataacactgatactgacacgtactgagcatctactgtgtgctggctgctgtactgagcactttaaattgtactaattcactttatcctcataacaattcctccccatgaggtaggctctatgttctattgtctttttttttttctaacgtttggagaaaccgaaggacagagagctgaggtggtttgcttaagatcactaaagggtaaggtttagagctaggattggaccccaggcctgtcctattccaaaatcagtgctcagccaggtgtggtggctcatacctatactcccaatgctttgggaggctgaggtgggaagaccgcttgagcccaggggcagcctgggcaacatagcaagagcctgtctttacaaaaacataaacgcatagccagctgttgtggtacatgcctgtggtcccagttactcgggaggctgaggcgggaggattctctgagcctaggagtttgaggctgcagtgagctatgatcatgccactgcactccagctgggcaacagagtgagaccctatctcaaacaaaacaagcaaacaagcaaacaaacaaacaaataaacatcagcgctcttcttctgcactctgctgattcccttggcattaataacaatgccagtgttggttgtagtagtaatcatagtaatggcggttatgttggctctagtgttttgcagttactatgtggaggtacccagtgtacctgacatggtggtgctgggccttccctcaccatatggcattctactgtaatttcttccagggcccctaacatctctcaccaagcccccgctccagggagaggggaggggcaggggcagggcggggaggtccccactcaccctggcactcccgtgtgttctggtgggccaaagtgcccggcgggcaggtgggcagacacttccccttgtacaagtaaaactgcctcttgcaccggatgcagaagtcctggctgaagcagctctcacaagtggccccacattctgtaatagagccagggacaccccaggtgagggagactgccaaggatggggcccactgggtctgcccgaggtggaaggccctctgggtagctccaggcttggtagcatttgggtcaggactcagtgtctcctttgaagcccagacttggccaaggtcaaactgggctgcatgtgaagagaacactccctttctcatttgaggggaggctcagagagagcgagtgacttgcttgaagtcacccgcaaaccagggctggagtgaggactccctgcttctttttcacctcagaaatagtgataatttgcccaaagttacagcaaaaattagagcttggaattaggactccttttcctatttgagctaagaccagagaaggtgagttacatgcctaaggccacaccacaaactagggtagaagtgaaagttgcctgttctattagtgctaattaaggctgagagcggactgacttgcctcgggctgcggagtcagcctggacacaggcaggtatctcagagtctgggcttagacatgcacctacttcccctctgtctgtgctggggtgaaagggtgggatctaagcccatggtgtctaggagcccagcactagcatagaacaagggagaagccacgtacttttgcacctgttgacctcctggccgcggatgccgaagtacccagggggacagtcgtgcaggcacttgccgtactggcggatgccttcccggcggatgaacaggaagagcctctgctggcaggtggaacagccgttctcctctgagcagatgatacagcctgtgcagttgccccccaggccagtgcccactgcccacaagaccagggcagaaggagggggaaagggagagagagatggtcaaaccatatatgcgagcagctgagatggtctcattgggatagtaactgggcacatggccacccaaacaaaagactacatttcccaccttcccttacaactagatatggtcatgtgaccaacatctggccaatcagatgtaaggtaaagcagcatgtgacacttcaagaaagctgccttaaagggcaggggtgtgccccttgtcgtcccctcatcctttctgttgggtggaatgtgaacgatggctggagcacaagcagccatttcagatcatgaggtggaaactatgtcccgtgaggcggtggaaaaatcagataaaaagcacctgggtgcctgaggaaggcagaactgctgtaccagctctagcctgcctgtgtagactgttacatgagagagaaatcaacatctatcttgcttaaatcactgttatttgaagttttccatcactcacaagcaaacttaatctttaccaaagtaatgtgaatttttgagtgtgtgtgggtgcacatgatgagtggggtggggtgagaccctcaccctcctgctgggttcctgaacaatactcagcaatactccatttctcactgtcaccatcagcaagggctcccaccatcatcaggaatagcaatgggagaaatttttttaaggagaaaattttttgttaccccagaattggcacccaggagccaaagctggggaaaaaagaggtggaaaatgctctagaatcttaagtgagcctctcccaggctcataaggagtctctgttaccctgaccatcaccccaggaccctgattaagctgaacacttgcagggagggactcatgggagttagggattgtcagcctggccaggcacagtggctcatgcctgtcatcccagcattttgggaggccaagatgggagaattgcttgagtccaggagtttgagaccagcctggacaatatggcgaggccctgtctctacaaaaaatacaaaaattagccgggtatggtggcacacacctgtagtcccagctacttgggaggctaaggtgggaggatcgcctgagcggggaaggctgcagtgagctgtgtttgtgccactgtactccagtcggagagacagagtgaagccatgtttccaataaagaagaaaataaaaagaagtggacagcctagggaagtgagttgtggtgctgtgacttttcctctgttcccaaccctgccaacgaagtgaggagatgccagagaaactcacaaagacagggggtgcctgcaagaaggtgccagcatctcatgccctgcttggacataaactcatgtccatagccctgcgaatctgcccccttcccattcctctttgaacagagaaaggagaccaggagacagaagggcagagctgaggggaagagtgtgatagaagagcctgcacatccttcccggcacgtgtgagggagttctcagtggtaaggggcaccttgggagcagccaggcttaggtggtattcctgctgcctggcacaagaaggctggttgctgggaggtgccccagcagtaagaggcagcaggggagaccactgggagtaggaggtgggggagagtcagaaaatgaccaggtgtcactaagtgacaggaaaggatagggcagcttttgagaggcagcaattggggaaacagtaaatggtttcatgtttatatgtcattagggtcagactggttaataatccggttatacaccttgattcacctgagccccaagaccacccggcaggaaacattcttggctctccagctctcagatgctcccctcttcctattggtgccccatctcccttttagaggaattccccattgtgcaaggtcctgatgaaacacatcctggcaccttccccctggaacagaaaccaaaagagttctggccctcctttaagttggcagcaggtgagagctaacgaaagcccggtcagatacacattctggtgactccagtcctgggagtgggacacaagagtgagggtcacacagaaatggggttcatggtggaggcagggcaggctctctgcccagccctggctgaggcctttctctctcccttccatccctcagtccctctgttccttcctccctgctccagctctcggatgagtactgctacttccccagtcctcaccttctgttccttagattcggtgaggccccacatcctgctgataaccctctttctgttgcttataactcaggaggcttactgatccagggtcgtacggaagcacacagtaactaaagtgtaccctgggatgctgttcccaagcaaagttggcattgccctcaattttcttgccctgggataagaaactgcaacaggagagcagaataaagatttttgtgcctctggagctgtatacctggcagggatctgagggcagagagcaagtgtgatgttgtaagggagattcccagagccagagaaataagaacatccactgagaatttagcagagtccggacttctcactcagcaaaagattcagattctgatactacccagagctggcaagaatgagaggaaaccttcgctttttcaccttagataggagtgtaaacttcggggaaaaatctagcagtacctaataaatttggagatgtctcttttctttttgtgttaaaaagtttttttgtttgttttgttttgttaagacaggatcttgctctgtcacccaggctccagtgcagtggcatgatcctaagctcactgcagcctcaaattcctgggctcaagcaatcctcctgcctcagcctcctaagtagctgggactacaggcatgtcccaccacaccaagataattttttaaaaacttttgtacagatggtctctctctgtttcccaggctggtcttgaactctggcctcaagtgatcttcctgcctcagggtcccaaagtgttgggattataggcatgagccaccacgactggcctgatgtctcttctaaatgtaacaatttagcttctggtatataccctagagcggcagttctcaaactctggcgcacaacagcagctcctagagagcttgttagaatataggtccctgggttccacccctggtacgtctgattcagtaggtctgagaatttgtatttctaacaggttcccaggtgatgctgatgctgctggtccagggaccatgctctcagaaacactgacctagagaaacccttgtatatgtgtagaaagagacaaagatatttattgcagcattatttaatagcaaacaactgcaaaaagctaaccctctgccaaaggaatagataaatacattgtggtatattcatacaccacagccagataccacatacacaacccagccatgataaatgactgaggtagctacagttatcattgtgggcacagctcaaagacggggctgagaggaaaaaagcaaggtgcacgatgaatcatatagtaagagccatttatataaagttcaaggacctgcaaagcaatattttgtagcatttgtgacttgtaaatatgcattcagagcagaagacatgggactaaccaacactgaattcaggatcatggcacacaaatgtttattatattattttaaattcttgactgtaggtttgaaatagttcaccctaaaaatgcataaagaacaaaagaatttagcctctactgtgtcctggggcaggaggaggcctacattctttcttctccttctccactagctcccctcccaagccctgtcccatcctcaagctgaggtcttgagcaggggaaggtgacaaattctgaagacgtgggacccgggttccaagagcagtggagactcgtgcctctgcacactttgcccctcgtccactctcccctcatcctcagtagtggaatcctgatttttattttattttttgaggcaaggtcttgctctgccccccaggctgaagtgcagtggcacgaccttggctcactgcagcctagacttcccgggctcaagcaatcctccctcctcagcctccctagtagctaggactacaggcgtgcaccaccatgcccagctaatctgtgtatttttttgtagagaaatggtttcaccatgtttcccaggccggtctaaaactcctgggctcaagcaatcctcctgtctcagactcccaaagtgctgggattacaggcctgagccacagcgcccggctggaaccctgatattaagcggagtttatgtcctctaagactatatttcccaggccctttgcagctatatgtggtcatgtgcttatgccctgaccaatgggatatgagcgggcatgccctgtacagccccttaggaaacgctggcactgttctcctcccattttcccttatgcctgcaggagtgcaggcttaagagtggagccatggcagatccaggaggcagagggatcttatagaaagacagcttggcgtggctgtattaacccagggctgcccaccgccgagattctttcctggggaagggaggaaagcattgcccatcttgtttaggtcactgggcctttctgacgcacacattgactgatgatgtcgggttttccgccatgcaaggcagcacagagtcatatcagtggagaccaagttgccctgcgctgtgccttggcgctgtgtaagcccactgggcctgagaggcgaccccactaccaaagagcaaggggaccctcagttgacttgtggtgatctttatcacctggcagaataggacttcaaattacaaattaatttaaattacagaaaaacaaagtagcatttcctgaaaaacgaatctgtggacacagactcacaccctgacatggcgttgctgcccattttgcagctgagaaaaaccgagaatcaaggaggtgaaacgacatgtccagggtcacacagaattggcaggggtggacccacatcactctgccccacgctgccctcttagagcatctgtccagggcctcctgtgtcaggcagagcctggggccatgggggtgagccacgcatggcccctacccctataggacaaacagcctggtgggaggaattgaagcccacagaagtgacagcaaagcaggatgagataaggggtcaagatggagacaaagcaaagctcttaccactcttagaagagcttagaggtcactcagcacaactcctgcagtttcactggggacactgaggccagaaggggtggagctttccccaaagtcaggcagccaactgcaaagaagcctcagtcctcagttagagttatagcactatttgttttttgtttgttttattgtttgtttgtttgtttgtttgtttgtttttgagatggagcctcactctgttgcccagactggagtgtagtggtgcgatctcagctcactgcaaactccgtctcccaggttcaaacgattctcgtgcctcagtctcccgagcagctgggattacaggcacccccaccaagcctagctaaatttttttgtatttttagtagagacggggtttcgccatgttggccaggctggtctcgacctcctgacctcaaaaagctacagtatatgctgaaggccaaagaacccaacaagcccctcccaggcctcatagagtgctggcccactggatggtgcttagcatccttcaataccctggtctttgaaggtcaataccctggtctttgaagggtagtggctgtttctggcctcatcctcgaccctggcagttggctaggatgccctcttgtgcctctatgttgtaatggcacctcttgctttttgacttccggtagcctgtctggtgtttcgtcatgtctctgtaactcattagaaaaagcagtgctactgcctctctctaccccctgccctaaagtcacgggtgcaggcgcttgaatgttcattctgtgaatcatcagtgatgacaagagtctgtagagtgctgctctagaaagatccaaacttgaaggttcttaaacttgactgtgataacaatctccagagaggcttgtaaagcgtctgctgtgggccaggaatgtgcactttaacaagtccaaaataaatgtaacagaattttggaagtgtcttccctgttcacagtttcctttccctgagaactggccccagtaatcctgtttgtagggcatgactctgaccctaaccaatggctgtctcttccaggatgggccaattagaccatctctctctgggctgatggacaatggtctgcgctggccttgacctaaggcgatctgcaggtgggagggtagcctgttccaatgcacatgtgtgagaagccttggtgggcactagctaacagaggctctgctcctctgcactctctggcattgaggttcgtgtgctgccatatccacccagatgcacttaacctgggcttggccaatcagagcatcaggtccccttgactacagtggttgtaggttcagacacaggctcacatccccacaagagctagtcttggggtttttgctgaggtcaatggatgtgtgtggagatgtgtgtgttttcctttcctctctttggatctaggaggatatagatcagagctggtgggtgccacatgagggaagagcctctggagaatggaggccatacagcagaaacagagccaagagacacagacaaagaccaaaaagagtcatctgtgcatgtggatccaccctggggatccataaattctctttttttctcaggtcacattgagttaggttttctgtcacttgcaaccagatgattcccgactaatacagaagtagagagagaaaaataaatcagatgcagagagagaagcagcaaccagaacctcacgggctccttgagacagaaaaaatttctgactgcctcccagtccttcccaaagcttggcttgtcccatagctccaaatccagtgactttttcacttgagctggttttcttctgtcaaattacaataaaaatggatgtagctcactagacagcgaacagatcacggtggagcagcgctgctttggcgcggatgaggaacctggagcaccacctatccaacctgatcaccctggtgctccaggggacactgaggttccagggagcacactttgaaaccccctgggtccttctacacatcttggcctctgtcgctgtcctctcccagctgagatgcacattttaaaagcattcaagctctagttgcaacctccccaagttttcttgggccatcacagtggatggcaggcaccccatgtaacttccattaacaactgtctcccataatcaagaccatcctccctcagtcaaaacaccagtaggccacaaaagcatggccctgtgttgctccagcagctggagaggcttagaatgaaatctgagtcactccatgtttccccaagcacccgagggatgagtccagatttggatgtccattttatggagaatgagagtggaatcaaacacaccagatttgacagtttgcaaagtgataaaggcttatgacaactctgaatgcgtgcattaacccagggttgagtgatccattcattcattcatcgacccattcattcaacaattactgagcccctattctgggtaaggtccagtgctaggactcaatggttatgagctttggggcagttgtgtgaccttgggcaaggtactttacctctacaagcctcagtttttccagctgtaaatggggataataatgcttatcttgcagggctgttgtgattaaaggagatggtacgtgaaaaactgttagctcagaccacctgcagcaggcatctgataaactgaagctaccattattatattgagaatgatgtgttttctgccctcaagggacttaaaaatctaaagacgtgtaacaatgcaggttcccaggttgatatcctggccccatcactcattgaatgagatccctcgtctctgtgggcctcagtttccccatctgaaaaattgtggcagcaattcctacctccacgtgatttgttatgagggatgtgcaaaccagcaagcactggcacacagtaggtgctcctctgtaaacctaggttccctccctgttccctcaccatcatgacacacagtgggactgtcaaccaacatctggacccttgtcctctttcccaggtgagcaaacaaaagccagagatgttggtgaggctggaaggaggccagcagggtccagggacatggtcttttgccctctggatggtgaagtgctcagggcagagatactagccagcagctttggtcctaggtgaagggcaggcttattccttcttttgggaatagggaataacctgtgcccttcaaataagggtccctaagctcaggttcacccacatcctgagaactgccccaagcaccttgtttcaacaggagtcaacggctcaacatgtgcaagtgatcgctgtattttttttttccatttcagggttttgagtgaacttagggtcatctctgccatatcatgccttccatctgccttcactctgcagaacttccctgaggggtcaaaaatgcagggtgacatctgggacgctgaaaatgtcatgttctcctaggcaagctcgtctcctcagtagcccagtgaatctgtcattgaaatttccttaatacccaagccagaaagcctagccccatacattttttttaaaaaaaacaagactaatttggatagatttctagcatttaaaaaatcaagagatttcacattaaaaagctggaatttgaacttctctggaaaaagtcagaacatctaccaacactgggtctgctgtcacagggcagtgagtggttagagttacataaataaggcatatgttccccaggttactgcagaccctacccctccctattgtatttcagatactgagggaaaaggtcagctgccctatgttatcatccttgagctacatcttaacacccacttcactcactcacaatagaaaacaatgtagagcaggggttctcaaacttgggcatgcatcagattcacctagagagcctgttaaaaacacaggctgctgggccttaccctagagttgctgattcattaggtctgggcagggcctgagaatccgcattgctaacaggttcccaggtgatgctgacctttgctggtcctgggcccacactttgagaactactagtgtggaacagggttaagagccagactggttggattgaaatttcagctctgccccttacctttgccatgtgaccttgacccagtgccttaacctcactgtgcttcagttttctcatctgtaaaacaagaatcctcctggctgacctcacaggtgtgctgtgggggcctggcagggctgacagtcaagcgggtctccatgacatcactgttactaccattattatcaccacctgccctgcctgtgttggcatttgtgatcctggaactgctttgacaatcagtgcagagtttttggttttgatgccaacatttttgggggtagagtttcttcataattggggtgtgccctgggaagtgtgtcttgcatgagaacatcatgtcatggtgaactaaggatttaatacagctgtcctggaggactccccagggctaagaaggatggggaaagagagaaagacaccactgcccctgctgaggtccctgctctgtccttggggaggacccagaaccatgcaggagggccctacacagacagtgctgggcagcgcatcctccgatgcccgcctggcagtgcaggacgcatgtcaccgatgaccaagggaaataaaaaacatctgggcacccgcctgcccactcaggcctccacatatgggaggcagtcgccactgctggaggcttgctcagaagatcccccagcacatttctgcctaggggtagattgcaccatctctagcaagggggtgggccctggagatgactcccagcttagagactccctgggatcagggctagaggtcgctagcccactggacccttctcagcactcaggaggtggggggaccagcagggcagaacattcagcagaatgttgaggttgccttggctttggggcctgacaaaccaccacttcctagctgggtgatattgggcaagtggctttactgttctgagccttggtcttctcttctgtaaaatggggacgatagtagcaaccacctcccaggcagttgtggggatgccatgaactcatctgcgcaaagtgcttagcacagctcacggcagatgaatgagcactccattactacttgattcatgagagatgctcctttgagggctgggcccagcttggcttgctcacctttaaatccccacggccctgcacattgtaggtgcccactgactacccatttgtgattatacccattatgcccattcattatttcttaaatgaatgcatgaacggtggctcaataaaggttctcaaaaactgctctcagggggctcacagcctatttgggaggaccaggcccatacgaatgtggagaaagctgatgacctctgcccagcagggctcagagacaagtgaaggacccaggcaaggtgggagtgaaagtccagagactggagacatcaggggtggttttctagggaggcagatgtggggacagaagctgaggccaggagcaggactagtttgtgtagatggaagaaaggtttctaagagaggtgagtacaagatgatattgtactcatttggtagaaagggaggggcttgagcaaggagcagatggcaaatccccgctaaggtgccaatacaggacacctaaggggctaatggataagaccctcaaaatacagtaagaataggcacacatccaaaatggaaacttttcatcctttgccctccaaacctgcttctcctgtccatttcagtcaatggctactccactcagggccaaagacttcagcggcatccttgtctcttctctctccctcatatcctactattggcccatcaggaatccggtcagttccacttctgaaatatgtctgggaataatttctccacctttcctgtccctaccccgttccctgctcctgccctgtttccccaccactcaccttccctggccatgctggcctcatcctccatgttccccatctgccaagaccactcccaccacaggacctttgcacttgctcttccttttgtctggaatgcccttcccacattcacccgcaaggctccctccctcaaatgtctccttgtggggacaagagtgattccttcttagatactaatttgccacgtcaactcctgactaaccctgagtccagtaatgcctccaagatgtctagctgaagcattactctctacgtagaaacacttatttgctgcgggtttcacttttcctccaaaacaaaccttgatgctgctgcaggaagcataggctatgacacccatagcacaatgtcagtcacctgtgcactcctcccagagcacgcagacctttctccccaagatatgtaagccctgggtctggagagttacagcttggagatctacctatcttgaggctgcccaaatcttgctctgttcaaaagttccccaactaataaccctttaccaacaaattggaattggctgcctcattctttggtttcccagctccttctgcatttggggtcgctttatgtatacggccctttcacagaacaccccttccctgtgatgcccccagacctcttgcctgcagcagcaccacacctacaccctattcctctcccacgtcgctatgttcttcatgccatttattcccacctgataggttctaaatttggcaagtgctgttgtctctttcccaccagtgaaagatgagttccaggaaggcagggatgagccacggcacactggaccttctcacttatgcagcacctgccttctcacttaaccaattctttgttttatagctgcttaccattccgcatagaggggctgcaaaactcatttaggtgctattatcacacccatttcagaaaggaggaaactgaggttcagagcaatgatgctgcttgcccgaggtcacttaataagtggagcagatattcaaacccaggcagtgtgactctgaacctgagggttatcctcaggttgccacactgcagcctggctactcaacatatccctgtgcgcctcctcagtcctccatgcagagtcccttacctactgacgccttgctaagttcccagtgctgtgctgaggccttcttcggtgtccgcttgacctcacctgagacaggaaattggccaaatggtggcagtgcaggctgccccaggactgaacatgccccctctgcattcctcatccatcctcccctcacccccagtagagagtgagcagatcaataggtgtgtgttcaatcaaggggtgaaatgcccactccgtctctcaaattctccaggagtgagtctcctgcctcgcagctgggacttggggaggatgaagaaaaattacctgctaagttgcagcctctgctggacattctggccagaatcctttttagacgttgacctatatgggctggttgcaggggtggagagggtggtggtaaaaccggggttcaaactcacatttgttgatttcatggccagtggtgatctcagatttcaatccccatcagaatcacctgaggctgcttattaaaaacaagaggtgctgtcgcctctcgacacatgcggttgttttaacgtttatggtgtgcccagggttgtacgtgcatgaactcagagatcttcaaaaactgtcctgtgagatcagccagggcttcccaaactgtaatatgcacacaaagggatttaactcagggatcttgggttaaaatgtagattttgatgctaaagttctggaatggggccagaggtgctggcccgagaactcactttaagaagcgaggcgggagatgctgttatcattcctcattttacggttcaggaagtgaaggctcaaagaccaacaattataggtggtggcattagatttaaacccacagctgatgaaaccccagactcattctactgtgtcacactgccttaccctgttggtctgatgatgaacgtggagcgggaaaatgggagtgatactcaaaaggggcaacctggccaggcacagtggctcacgcctgtaatcccagcacttagggaggctgaggcaggtagatcataggaggcccggagttcgagaccagcctggccaacatggcaaaaccccgtctctactaaaaatacaaaaatcagctgggcgtggtggtgcacacctgtaatcccagctactcaggtggctgaggcatgagaaacgcttgaatccaggatgcggaggttgcatgagccaagattgcaccactgcactccagcctgggcgacagagtgagacgctgtctcaaaaaagataagatataaaataaaataaaataaaaataaaatatcaaatgggcaacctgactcctttcgccactcataggaggggcatttccccaagcagcctgagttggggacagtccctgccaggcccagcatggcagaaaaaggaagggctgggttcatgtgtgcccgacatgtgtgtgtttgggggacaggggcaggtatgtgccgacacacgagacccctgtctaaaggatctgcctgtccccacattaaagcatagagaaggcctgagcccctgccctatgctggtcctgcagggctcggctggggcccaaatcaggggttgacacagtgagaacaggctgctggtgcctggcatcccccacttcccaccccacatcaaccaaatctctgcttccccattctcctggacctgccctggaccacatctattctgccctccattagctactcattaagagaagttacatttgtgtttctggtgggagccctgggggtgctgagcagcccagagcaaccactggtgaccttcagaaaaatcatattaaagaaaaaagggttgtttttggattcctcatcattcggcaagctgtgctgggggtagagcagccagatgagttcgggaccggggcagagagtctaccctccagctggcttctccagacccacctgcccagagctagtgccctgttagccaggaacacagaactgtcacaaagctgtcctgagcatgaaactgttaccaaccaatctgtccgtggagttgttacaaaactgtcttgtgtgtgaaggtgtcacaatgttgtcaagtatgtgaccttgtataagaaattgtcatgcaattgtcctataggtaaaactgccatgaagttgtcaagcatatgcagttgccactcatttgaaaaactactggagaagagtttcttttcttttcatgtatgagggacaggtttgctgtgtgggtgactttgaaaaagttgctgacaggcactgtgcttggctgctgctcctgtaataacagcgcccggcacccagtaggtgctcagtgagtacttgccgaatgtctcctcagggctgcaaagtagactcagacaggttctggttctttcaggtgctggctttgtcccgtagtgggctggtctgatgtgacctcgggtaggtctgttgcctctcgcatcctctctgagcctactttggttgttgtaaagtgccctgaggcctgtgtatgacgtgcccagcaatactggggacaataaatgctggctgctaattccctctccctcttgtcgggggtttatgattcctcagggctcttgatggtagcagaggcctctcgtggctctttgggaggctgtggaagcttcagctttggctgagtaggacgtctgcagtggcaggacacctccagccaatcaggatgctcagtgtcacagggattgggggcaacgcccaccgctacaaacccaggaggcctcctctggggaggatgtgagctccaggattccaggaagggtgggaggaaaccttctaaggggagctgaaagctcgttgattcctaagatgagcccgagtgagaaaggtaccaggttttgaagtttgttctgcaaacgaccttcttcacttttttgtgaagtcctgcaatcaacagagctcagggctaggaattaggacctttgctcctgtcccaccttggactcagactcattgtatgacctttggcagagcacctggagcttccaaggggtggcagagagttgggaatgcagtttcctatcggaaaagcagagccttggtcttgataaagaacttttgaactttttcttagccaagggagccttcctttttgcaagatgaaatgtgacatgagagatcgattcctaaaatgaatgagttgagctgctttggctgaggccaggatgggggtgagggtgagcatcttgagctgtctttttggtttcctttgcctacttctagaggcagcctctgagagcttggataccccctaaggaacctttgaaccccagagttccacagtgctaatggctgcaaggcaggtgatataattttgtgggactctggagcctgggttcattcccacactagcttctctgagcattggttttcccgtctgtaaatggggataacgactatgctcacatgttgtgacagtgtggtaagctggttttgtgtgtggcatgccaaaacagggtttggctgacatggggtgcacagcaatgtgggagctgctagcagttgtggatctcttctttcacaggccagactgcctcaacaatcctgcaagatgggtagtattatctggtcttgcggacaaggaagctaaggcacagagaaggtaagtaagttgcccagatcccatagctggtgagtggcaaactcaaagccaggcagtcttagtaacagatagttattattattttaagtactggggagagtctaggccccagaataggtccaaaataaataccctcctcaccttacataattaagctctaagaaagcttagaaataggccaggcacggtggttcacacctgtaatcccagcactttgggaggctgaggcgggtggatcatgaggtcaggagttcaagaccagcctgaccaagacggtgaaaccccgtctctactaaaaacacaaaacacctgcaccaggtgtggtggtgcgcacctgtaatcccagctacttgggaggctgaggcaggagaatcacttgaacctgggcagcagaggttgcagtgagccgagatcatgccactacactccaccctgggcgacagagtgagactctgtctcagaaaaaaagaaagctgagaaatataatcagctcccagtgctgagaagacttggggccccactgccagtgagcatcaggaaagggggccaggtctaaaagtcagcgctgactgaggcaggtccttggtcagtgtgtccctgccagtgttcctgggaaagccccagttcttctcagccagcaccctgggtacctggagcttccaaggggtggcagagagttgggaatgcagtttgggcctccagcccaatgctccatgctccttgcccagtaatcacacctggcacaaagtgagcatcttcaaggaccctattctgggtctggtctctccccatgggccttcttcaacactcaaatcctagtagtacaagggagagagccccagatgtggactcttgtccagttctgtgtgtcctcaggcaagtgtctccctgtctctgggcttcagtttctccatctgtcaaatggatggttaaactcagtgtttctaaaggcccactgttcacccatccatccatccatccacccacccacctacccatctgcccacccatctatccatccccatccatccatccatccatccccatccatccatccatccatccatccatccacccacccacccatctatccatccactcacccacccatctatccatccatccatccacccatccatccatccaccaacccatctatccatccaatcacccacccatctatccatccaccaacccatctatccatccactcacccacccatctatccatccatccatccacccacccactcatctatccatccatccatccatccatccacccacccacctacccatctgcccacccatctatccatccccatccatccatccatccatccacccacccatatatccatccactcacccacccatctatccatccatccacccacccactcatctatccatccatccatccatctatccacccacccacccatcatccacccaaccatctatccgtccatccatccattcagcagatatttcttgaatatcatctatgtgccaggatcctttatttattaaagttaaaagacaaatcacagacctgtagaaacattttagaaagacatacaaaatcatactggattggaaatgtaaatttccccaggacttttgttcaccagtgactctccaatgccatgcatggggccacatgtctactaggtgctctgtaaaatgtttattggatgtaagaatgaataggacatattttgctgttctaaagagagctgcctccgagtctgagattggagtcagacatcctctctaggacttattgagagggggccaactatctttgtcacccccatccctgacctgccccactgcctccccagcccatataagccagtttctaaagaggatctaaggaggattggccagcagtgactggggcagggtagggcacggcatgcccccaactcccaagcccaggtgggctcatggtttggaggggagaagctatgaaccagagggaaacaggcattccatcccttgattgaactcactcttgttgatctgccctgtgtccattgggagtgagtggagaatgaatgagaaatgcaaaaggggtggggtctggcagaggcagcctgcattgccaccatttgaccaatttcctgtcaatttcctatatttggtcaagtggacattgaaggaggctcttgagcttaatctaagccatggttttccagcccaaaggggcatgaggctgttgaagtggggatggggtagtgaggaagctagggtgatctgaagaggtcaagctcgtgctccttgctcagtaatcacacctgtgtaccaattaggcacctgccacacgtgggagaaaggggagggcatggatggaggcagaggaacatttagtcccagtccctccctgctgctcactggtgatggccccagagttttctaacaccgggaattgtggaggccacagcagcatcagggtagtgacagctgtctctatccccattccttcttctgctccccaacatacaggggagaaatcaacccagagggaggagagaagagaatgagacagcatgacatatctccctacagggcaaatcagtggagtcagaagctgagtcaggcagtgatggggaagcagtgatgggaaaggagagcttcaaatcagacctgtattttaaaaattcagcactggactaggctttttaatagctgaaagttaccagaaagctttgagatctgcccaaagttattaaggattggagtttaaaaatacgactgtgcattgggggtggggggtggggggtgcatggaaagcatgccatgtttgtaaccctctgttacaacttcagtatcatcattaagccagttacacacaaagtaagccaagaatatccttaatacacaacgagctcctataaatcaataagaaaaaggggaatgatccaagtgtgtggagggagaatgggcaaagacattacaaggaatttaaaaaagaaagacaaataggacaataaccatacgcaaagctgttctacttccctaagaattttcaaattgaagatgagaacaagaatgaaataccaccatgacctacaagatacggaaactgtaaaagactccggcaccctcttttgagaaggcaattaggcagagtctattatctgtagcctgaggtagtaacagcattttacaggaagtgtcctgagttgagagaggggtaggcacttgttagaagccacacagtgagtcatgggaggggaggagctagaactcagacctctggatgggcacctttgattctttatctccagccagctggtcctctctgtctgggctagtgcacagcctggcccctggcccctgtctgggtagcccaggtctgctacatccattgctgcaccctgctctgggcctgaggatggttggggcactgctattccaaatgacacatctcttatgattaccctgtccttcctagacaggaagctttcaattagtcctgctgggcagcagccttagagggtagaggtaggactccaaggtttgggatgagacaaacctgttctcaaatcccagccccacctttactccctgggacagttacttaacctcagtttgctcatttgtaaaaggaacactgtccaggtgcggtggctcacacctgtaatcccagcactttgggaggctgaggtgggaggattacttaaggccaggaatttgagaccagcctgggcaacatagtgagacccttatctctatgaaaataaaaaaaaaaaattagccaggcatggtgatgcgtgcctatagtcccagctactcaggaggctgaggtgggaggactgcttgagcccaagaggtcaaggctgcaatgagctaagatcgtgctattgccctccagtctgggtgacagagagagaccctgtctcaaaaacaaacaagattaaaatggacacaatcacccacccactgaaaagcttgttccttccacagatatttattgagggcctactatgtgccaggcacttttcaaggcactgcagatacatcagtgaatgagacagaccttcccctcatgaagtttacatcctaagtgggagagggagatcatttcagagaacgacagggaattgaatttgggtacacagagtggcaggagggagggcctgggctgcctggaagggcatctctgagatacacaagaaagcactcttggcggagggaccagtgggtacaaaagcccagaagcggcaaagaacgtggtgtggaagagagcagcaaggccagagtgcagtgactgaggggagagtggtgggtggtgaggtctggaggcagaggggccagacccccaggacacatggatgagtttggatggtgctggattttcctggaagtgagttgggaagccactgtgggttgcaagccgaggagtgtctgccaccttgaaagcttctctggtgctgaggggaatggactgtggggcaggagtagaagctgggagctcagggtgtatgggctgtggtcattctggtggcctggacgaggctggcagctatgagaagtgggtggatccagggagggtggacagacaagctctgctcatgggttatcatgaagattaaagggtaagtgactcagtccacagtgcagcacatagcacatgctagacagatcttagctgttttatttatgtatttatttatttttgagacacagtcttgctctgtcactcaggctggagtgcagtggtgtgatctcgactcagtgcaacctctgcctcccaggttcaagcaattctcctgcctcagcttccctagtagctgggattacaggcacccaccaccatgcctggctaatttttgtaattttagtagagatggggtttcaccatgttagtcaggctggtcttgaactcctgacctcaagtgatccacccgactcagcctcccaaagtgctgggataacaggcgagagccactgcgcccagccagatctcagcttttaagaggcctagacctagaatcccatgactgtgtctaccccacagcctcctccataaatgccccaaatcgcttctgcctctcctggtcattggttcaaaatgtgattccttgacctcttgttgcctcttgacttttgcagctgctgggatgaagtacttgttctgagttcctctagttgctattttaagcagactgcataccctccggcccccatctcccaagctggtgtgaaacccaaggcagtatctgggtggctccctaagtcgttttccaagttgagaataggtagtagagtcacctattctcacaaccgtgacattccacccagtccaggctcccagactaactgcccagcccctggaagtagagagatgggaggcagcaccaggcagcagggaacccaggtttgagtcccagctctgccaccttgaccctaggaaggccctttgacctctctgagtctctgcacctcttctgcaaaataggaatgatgatattaaagaattgcttgcagggtaaagtgaggtaataacctgcggagcacctggctgtgtgcccagctcatatggcaaacactcaccaggtaggaggatcctaaggttgtgggcaatgcatacaaagcctctggtgcattgtaggtgctcaataaatggtaggatgccagtagggaggagttgaatgagaaaaggggaaagagacccagtgcatggtgggggtggcaggaacacagggagttgggggctccaccttggaaacctctcctggccctgggggcactatctccaccaaacccaaatccaggcagctagagggacctgggcctgcacaggcatggaaattctgcactcactgttagtgggcctcagtttcctcatccgcgaagtggaaaccataacccttcttacccagttataacctggattctgggctggaaccaagataagcagctacaggctgtcctaccccacccccagctggagacgcgggcctctgggagctctggccgattttcaaagggaccagaactgcaaaaaacagaactaggctaatgctggctgagtgttcacagtgtgccaggacctgtgccacccaggtccttgtactaaatcattaaaacttgccataaccccacaaggtgggggctacacttactccattggcagggatgagaaaactgaggctcggagaggtaaagggcttggcccaagcattcacaggaggagccaggaggaatgcaaaactgagcccagctcctaactactggagaggagcctgccttgtggtccgtcacccctccctgccaacccctgccagctgggcttccaaaggccgacaaatgctatttaaagtcatacgtctctcaggtcccgaggcacaccagggatggaccctaaactgtttgtgggggcagacaggagttatatcagccaagtgaaggcaggaggggaaggctactccaagtgcctttagtctggaactgtttgcattgcagggatggagcccttagtagcaacctccagacagtcaaaaaagctggctttgcacacaaacatcccaagtgtatgttttccttcattctttctctttctcttttctttttccttccttccttccttctttccttccttccctccttctttccttcctccctccctccctccttccttcctttctttttctttcttctttctttctcagtctctctctctctttccctctctctcttcctggggtggggagttgttgatgcaagagaatgagatgatccacaaactgaactggttcagccaaagcagccctcagccaggggcgagcgggaagtgtaagctgttggctgaggattctccttgtgggggattttgagcccctgtggggtgttgttcaagccaatgtcactcgcctccaggggcagggagtctccagctgatgtctctcttagaggaaaattcactgctgttgagcttactacctccatcagagtaggggaaaggggaccccaaggacagggtctggctagcagcacatgctccgcagatgcgtgccaactgcaggctgtgatcctagggcacagtcaggaaggggcgtggacagaggagcattgtcgcaactgagcgtcccactagcgtcctcaggaaggcccgagggctgctgcagcagcactaacacttggaagaatccctcgcgggaagggtggtccaatgttgaggagtagcagatccaagctcacactctggagtgtgactttgcttgtttattttaaaagaaggggtctcaccacattgcccgggctggcctcgaactcctgggctcaagccatcctcccacctcagccccgtgagtagctgggatttcaggcgagagtcaatgcacctggctctggggtgacttcttgtaagaccttctcatacagactttttaataagatcagaaaacccagaccataaggcagaacaagccccctctccccactcaaaaaccaatggatttgaccacactgacagcatggtaagcaatgatttctactctccaaaggtgaggactctacaaagtcagattaaaaaagattttttttgtgtcaaaatgaacatgggattgatatctaggtaatacaaggaagccctacaaattgacaagaaaaattcaggaattccaattttaaaagtgggaaaaataaaaataaaatgtttaaaaagtgaaaaaataaaatttaaaattaaaaatcaggtgaataagaattacatgattaaaacaaatttaaacagttaaaataacattcaaaaacgaaattaagtaacaaaataaaaatttaaaaataaggtataaaaataaagtgtaaaaatccattcaaataaaaaatacatttgtaaaataatttaaatacattaaaattaataaaaacaaaaatgttaaaaataaaagtaaaatgtttaagtgaaataaaatttaaaaatgtaagaatacatgaaagaatttttacgagtaaaataaaaaatcagctatttttaacaatctaaagaataaagaaaaactaatagaaacatcaaaggagagcaaggtcttgctagatggatgctgatgatgtgctgtgaattaaggagtccgattggctcaaatgcctgcagggaggcgggggaagtgaatgacgggggtggtgtagggagtgagaggggacgaggaagtaaaagcatgcccgcaggcagcatctgattcggtttttccagcccgctgtgggcagagggcaggaagtcaggccccatcatggcttccccccaaaatagccatcacatcatttatgcatttgtaatgtgctggcaacatacgcacacgcacacggatgcatgttacatcatcccatcctcactgccccatcctcactgctgtcctctgaggtccactttcttttttttttttttttttttgagacggagtttcgctcttgttgcccaggctctgaggtccactttcatagaggagtgaacagagactcagagagggtgggtcactgtgccacagtcacacagcacttaggaccaccctatcctctgaatctggcatgctcaaaatgaccttctttggatgagttaggtctgctgagcactttcaaacagaggcagggccatctctgacatcaggctcgaacgttctgtacactaggaagagcccaacctctccccccatgacgcatgacagttatcaccattaaagaaacactgactgtcttccaggggcgtcacatgcatagtcatcttgaaaaccatatgaggtagatgctcttattgtccccattgtattgacagacaacatcgagattcaggagtcaaatactgtcacccaagcatggcagtaacagaactgggagctgagcccaggactgtccacagcccaaatctcacactccctgcgtggcaccaggcccttttaaccgtcattgatgagcactccctatgtaccagcaatgcgtttgtctatgtttcatgcctcattttgcaaattagccaacgggggcacagaagggagagatgacctgcccaaggtcactcagccagtaagtggcagagcccacagccttcgtgacagcctgccaagcccccagtgctcatccgggacttgctagagacagctgtgcccactggccaaccccagatcaggctcagaagggcaactgtgacattccttctcttcatgtctccaccctggcggatgtgggctctgccatcgggctccagggaaagtggaggcttccagtgaaagggagtggtttccccatgtggcctgggtcctctgggcttgggaatgcctctgttttgagctggtgaaacagaatttcccaccccctccgcaatggcacatcagagcccccactatgggccacagagcaagggccctatgaatcatgctgcattactgcaagaaatcattccagggcaggcagtggcggcccagcatgggacagcagtgtccgggtggagttggcgtcacccatccggagatgggaagcagaccattcccgaagggatctggaagaatctccgagggcggggctgagggcaaatgtgtcctggatgctgctgttccaccgggctaggaaaaaaagctccagcccacagagacctgggagcacatcacgacctttccccagcctggctgtgtgtccttggcaagttgattcccctccctgaatgtggaaggcctcatctgtagaagagggagaataatagggtcaagccacttcatggggctataatgtgggtagcctgggaggagggctggcatggtggttatggactcaggctttggaatcaattgtctggatggaatcctggtttttgccaaacttactctgccaagctgtggggtagaaacatgaaattgctaatatttggctgtttatgacctagaaaaatggcaactgcatatacttcaatgaatgtgcctctcttttaactgcttcctcctctgtaaaatgtgggtaataacaggcccctcagaggggtgctgtgaggatgaaataaggctgggaggcaattaagttcagtagttagagctgggctctggggcaaggaaggatttgaaccttggctgagtggccttgggcaaagttacttaaccttcctgtgcctcagttttcttgtctgtaaaataggaatgctactgcccactgcacaggtttattaaggtaatttaatcaattaatacatacaaagtacatagaacagtgtctgaaattgttacataaaagaatgcaggtaacatctggcatctcctgcaccctcatgtctactcacataaatgctcaaccacgaaacaaaatccaaagtgacttttgtaaacctttgatgccaatgaaagttaagtatttttaaagaaaaaatatgttttggggaacatacatgtgtgtagagatgtaggtgaggagtgtgctccccagggtccacccccagggctgttctatgtcctgatggtgcctatagcccaagactctgaggacaggactagccttgaggccatgatggccccgtggcttggtctctttcacaaaatcacacagccaaacctcagaccctatggagaggctccacttgcctaggtaactctagaggcccttaagaggcacccagccctgggctggcctctgattattaagaaattcctgcagacagccttggatgtgcgaaagccctccagcttccatcctgtcttaatttttttttagacgaagtcttgttctgtcacccaggctagagtgcagcagtgcaatctcagctcactgcaacctttgctttccaggttcaagtgattctcatgcctcagcctcctgagtagttggtagttgggattacaggtgtgcactaacacacccagctaatttttgtatttttagtagagatggggtttcaccatgttggccaggctggtctcgaactcctggcctcaggtgatctgcctgcctcagccttccaaagtgctgggattacaggcgtgagccactgcgcctggctccatcctgtcttctgacatttgtcccagccctgggaaaaaaggcaaagcacactgagcatttccaagtcacgcggggggaaactgaggctctgagaggctctcaacctatcaggctctggagcaggctgccttcctctaccaattcaagttttgccttcaccgctagtctcctgaaccctcacttctactcacagctgggtgaccttgagtaaggtacttccctgcttgagtctccaattttacaaggattggtctcaaaggtctcacttggcctttttggccttatcacttcattattctagaacccttctccagaatttcagagagaaaatgaaagctgaattgctctgcaaactataaagtgctacacaaacaagaaggtggttaatggcagcattagatgggttttcagaagtctaccgtaggcaggatttgctgtgggttttggaattaagaagacccagctcacacatgtatttgcgacgttactttggataagccagttcccctctctgaaccaacttccctcttctgtaagctggcggtagaggcatatccaccaggcaggactggggtgaggaccaaaggaaaggagcgtgcaatgtctgccacgccctggccgagcagaggtgtttgatgcaggaggagatttagggccccgacacatcattccaccttccaggagctaaaatccacacacctggggaatgatgtagctgtcagattcagggcgattagaaacaagcatctgaactaaggcaattgtttggagctccagagacagactctctgggcttacatcccagcacccctgtctgttgctataccacccactgggcctcagtctcctcatctataatataaagatcctcctggaatctgccccttacagctgtcaggagggcctccattaggccatgactgaaaggggctgagcacagaagatgggctcagctggtccagcagcctccacactattttgacaatggtatcagtagacacagtagtacacacgtgcacatgcatgcacacactcacatacatccacatatatgtgcatgcacactcacccactcatacacccattcacatatatgtgtaaactgaaacacatttctcaaaataatagttttcacacttgcaatgcactctgatatattctaaaaaggaggttggcaaaaatcgcagcctctggaccaaatttggatgtttttgtgttgcctgtgagctaagaagagtggagtacatgacagattgtatgtggtttgcaaggcctaaagtatttactatctgacccttcgcaaaaaatgtttgctgaccccactctattttagtcagtgctattccattccgttctgttccgttccattccattccgttaccattccattccatttcattagaaaatgctggctattgctaaatttattgtcctcacctgctgatgcattgtaaacctcagcttggaaaactttaaactaatgggagcttcagttttttcaccagatgggaggatggatgaacaaaccgtatccatgtgacaccttagccaagcaacctcccctctttgtcttggattcctcggctgaggctgagaccaccaccaccagcctgctctcaagggtgtgttgaggtgcagcctcagaggtcttgtccatgatgttctcattgacggatctcaagagcccaatagtaaatactttaggctttttgcaccacatacgatctgttgcctattccagtattcttagcttgaaggccatacaaaaatagtcctgtggcggcagaaatggaggaacacccatctctgctgtccttttcaatacccagcccagggcctggcccacaggaaggacccaataagtatttcttcatggtgatggtgactggagagtggcacccaaggccctccatgacgggactctggcccaatctgcaatcagaacttcacttccttcggccacgcagtcccttgtcccctccacctggccacactctctcctcatcctgcagaggtcctcaccttactgccacctctgcctgacaaaatcctaaatcctactccccccgatggggttcctctcagacacttacaccttgcagccctggcaaatcactggcatgattcatttctatatctattgcacgggcttcggagcctccaaaactctgggtccaggtcctggctcagcagctgtgagctctttggcaggccattgatgctttctgagcctcagttcccgtgtctgggaaataggcataacacaaggcagtggcagagtgaggacgcgcagccccacctgcacagctcctggcacatggcccgcctccctccttcctcagtggcctcaatctcagtggcctgaatctccttcagtggctgggcaggggggttggatggtttccgtccacaggagagggaggtggggccccccgtggtggggcaatgggatggaaaagcagcatctcttttgcacccaggcttggcttcagaacgctgagtggaagaaggatggcaaatggagctcaattgattgaccacctactatctgccaagcattcagatttccatttctcaaccagcccctatgctatgaagaaaccgaagccgagagacccaaggttacattctattaagactcagcgccattccctcagccctcaatgtccagtcattacccacccctgccctgtaggaatccctttcagaactacccctgcatctaaacctggcttcacctggatgccagcactcaggggacatactttgttcgtgcccagcgatggcgcctgcttgcccagggcctggtgcatctgtctgtgtacaggagacagtgctgtctgcctggccctccacaaggggctttgcaatttaaacggaagcatcatattcactccacataacaggcctctggagtgggcactgccacagtcaatttacaataaagaaaaacaagctcagagagaggagaaggtttgctccggatgcaccacaagcaagaggcagaggtgagcttaacccacgtgagaccccactcccttccggtccagggcatgtctgctctgctgtaaaatgggaagggaaagtggtcaaatccttatgaagcccctactgtgtgcctttggcccccttccctcttggactgcagtaaatcttcccaattgctcagagaggtaggtgtaagttttcccatttcacagatggggaagcacggacgggagaaggcatgtggcctgcttaatgtcacatatctagggcaggagagggctcaaggtttgatcccagggctcttcactttgccccttgcttgctcaggtctagaaagatccagaagctccatgtgaatgtgggggtccctccccagaaggccttggatgtcagggaaagtcagtcacaggctggcatctcctccttgcccaaatggacctccagatctagggatgcgaaccagggccccctcactctgccctactgtcccattgccaggacaccccagcatgtttcaaaaaaatgtccccatctggttctgattcatttacacttcattaatcaacatgctgttttgtaagagacacttgagatccaagaatctttctcaagtcttttacttcattctttcttagaaacagaaaaattgggcttcattaagacgcagtgacgccggagcctgaggaaggatgggcctgtgggaaccaggcctcaagcaggctcagagagggcagatgccagcccagcacctcattcctcgggattgtgcagacctggccaaacgctaaggccaaagactcaggcatgggggaggctggagaaaggtgggaaagggtcatccctctatgttggcagctccccaaggacaggcccagggctgctcacctgggtatctccaaggtccccaacacagagcctggcacagaggctgccctgtgaaatgaacaagtgaatgaatgaagcactgccaatacccaggtgttttcaggacacattctcctgccaaagttagataaggtcaaagctggtaggaccctgagggattgtgtacagaattttccaagcagatgccttatgagaaatggtctctgatgtgtaatatgtttgggaaaggtcactctctctcgctctctttttttttttttttttttgagacagggtctgctctgtcgcccaggctggggtgcagtggcacaatcacggctcactgcagccttgatgtctttcctgggctgaagcgatcctcccacttcggcttcctaagtagctgggactacaggtgtgcaccaccaccaacatgcctggctattttttgtatttttttatagagacaaaaaatgtattttttgtagagttttgccatgttgcccaggctggtctcgaactcctgagctcaagctatcctcccatcttggcctcccaaagtgccaggattataggcttgagccatcgcacctgggttacactgtctgtctccacctcttcagcatgctctgataagtctcacagccaagaaatctgctaaacccagcatttcccaatctatttgaccagaactcctgtggctgccttgcaaaatatgctacaggaagggtttatctagctctggtccccactgcagtgccagtgggaaactgaggctatgggcgggggacagagaaaatccactcacccaaggtcacatgatacaactgggtcaggggtgtgactgaaatccaaggctatctccattgtaccccaacaaataaatggagccctaagcctcttctgaagatgctaggcaggtgtgtgtcccagaggcaagagatcaggtactggaggagggatgctgagagcccctcaccaaattgcggccatatccctacctcctcactgagctcctggggaggtggtggtgagctgtagatggggcggggggcaaaaggggcaggataggaatttttcatttttctttaatttttttgtcttttttgagctgagaagcatcttaaagtcttctaaaccagctcctttttgttgttgttgttgttgttgagacagagtctcactctgacacccaggctggagtgcagtggcatgatctcggctcactgcaacctctgcctcctgggttcaagcgactctcctgcctcagcctcccaagtagctggaattacaggcgcccgccaccacacccagctaatcattgtatttttagtaaagacagggtttcatcatgttagccaggctggtctcaaactcctgatctcaaatgatccgcctgccttggcctcccaaagtgctggtattacaggcgtgagccaccacacctggcctaaaccagctcctctttagatgaggaaactgaggctctgagaagggaagaccagcacacctcagaagatatcttctcagcattatgtcaggcagattgggattcgagcctgctttgctactcacctgctgtgcgaccttggacaagtcagtttccttctctgaacctcagttccctcatccagaaaacaagcatctctcccctccctccactaagccactgtgagtagccaaagacacagtggacaggaaatgagaatgattaatacttacgagcacccattaggagcctgtgtccttagctactcatcttgcccacaatcctccttatgagcaggatacttaagtaaaagatgggttgatgaagggaaagggggtttgtttgattttttggtattgtttagaatggagaaagatctcagagatcttctaaaggaccctcagatgggtaaagtgaggattggacaggcaaagtgacttatccaaagtcactcagttggtaactggggaagctgggatttgaactcagttgacctggctccagagcccatgcccctaactactaaacaaaggccattcacaaaggagtgtccccatagagtcccaaactcaccccagctcagctgaaaaccacacgcctctctagtcccttgtcccactgtcacagcaagaactggagcctcttgggccacagtctccccaaccccatccaatcccacctcccaattctcccacagcctctgtctgcttcctgctccgttccaggagtgactgtgtcgctgtagggctttcacacaaatggaaggccccagagggcaacccatcctctctcattttccttcccctttatccttgctcagacccgatgccagggctggaaagagagaagacaccagctggacaattcagcagttatttaaaccagtctgagccttggaatcccaggctttattaaaactggacgacccctatgtcatgagcatatagttgggatttgatgagctaggacatgaaaaacccgtggcatagtggctggcattcggctgctgatcttaagagtggcacctggaggccaaagggctgcccagctcaggcaggcgatttgctcacttgctcacccgcttacccttctctgaggcacaggctctaccaactcctgctctgcagggacagcctccaacccaccttctgaggatgttctgactctcacagcgaggctgtggcataggactcccaggtgagagcgcatgcggcccctggtacatttataatctgaaccttggctcatcttcctagtggcctgagaggtgaagatggaaaagctgaggctctctgaggggctggacttcttctaggtcatcccctattagaataagtgaacctgaactcaggtctcaggtctggctgaactcaacataggggggccatggaggatcactgccctctgggaggtgacaccaggagtcagggtgagtgatgaggctgggactggggcctctggacgcccagcccaaggctctctatgtcacttcctggccgagcatggatgcttggaatggcttctacgccactgagtctgtctcctagtccctgtgccccgcaggctggctcttgagtcttctgtctctgcacgaagccatcctcctttctgctgaccatgcggctactacagagagccctgctaccctctcccttctgggtgagtctccttggcccaccctactcaatggctcgctcactgggtgccctggagcctcaatctccccatcttaagtgaggttgagactcgtctggaggagcgaaggacccagggcgccaggcaccaggcagatgcccccagagccgccgcccccggtcctccggcccccggtctgccccgcagcgcctgcccggccgccctgcccagccaccccttgtaccttgcttcttccttcggttcagggcgagcatgtccacggcgtgggcgacgagcaggagcaggcagagtggcgcccgcatctgggcagccggatccgggctggcgctccccaggcggcccgacggcccaagggccccacgtcccggcggcggcacggcgggcgcgggggctgctgtgggcgcgccgggcgcatccgccaggcgcgggtcggtccggccgccaggtctagtgagggcgttggcggagccggggcactgccctggcggggaggagccggcgcggcgggggcggcgcgttaaccagctcggggcccgggagcgcgcgcggggagggggcgggggtcacccgggtcggggccctcgagttcgatctgtcccgcagccggcggtcttgcgtctttcccgcccccagcactgcccccgagcacgtgcacgtgcccaccgccagccacaggtacgcacgcgcgcgcaggtacagatgcgcggacacccggagacccgtacggtcccccgcgccctctcagcgcctgtgattttctttccctccccccagtcccctttctctgtctgttcctccttctggcccttaaggacaactccttgtctcctgctttctcggtctttccgcggcccgcgctcccctgctctgcccccgaccctgcctggctgttcctgcatcctttactcttgccggccgtctctctctcaggctcactgtctgtgtcctcctggctgggcctctggttctcccttttctctgtctctcccttcaaccccatctctccccttctcccctcctgcagggtggggtgtttgcggggctcctgctgcctggctttctctttttctctctactctgtctcattcttttaacagaggcctgagccccttctggccactaaccctgaatgtttcctgtgcagtctgcggggatcatctactccgactcaaagtgaccagcacctcataaatccacttgtgacagggctggggacctggactgtgtttcctccaaccttatcaccaggactgggagcagctggttcaagtttaaccctttcagagcaaaattcctccttcaacccgacagcatgctcacctctcctgtcactataaccaccaaaaacaacaacaatcatgctagctatcatttgtgaggcatatatggtgggcattgctaagaacttgacatatactagagtcttcaaaacaacccaatggtttgggtttgtattctgagtaattccacttttctggggagcaaagggaagctcagagaggccaagtgacttgcccaaggccacacagcaggtcagtggccattctggtccagtgcctgcccctcttagccacttctcaggcacagactcatcagaatggaagaggccttggagggaggcctagagaaacttacagttgacactctcttgctgaacaattgtccttcctttttcttttcttttttttttcttttttttgagatgggttttcactctgtcacccaggctggagtgcaatggcgccatctcggctcactgcaacctctgcctcctgggttcaagtgattctcctgcctcagcctcccaagtagctgggattacaggcacctgccaccacacccagctaatttttgtagtttttagtagagacggggtttcaccatgttggccaggctggtcttgaactcctgacctcaagtgatccacctgcctcagcctcccaaagtgctgggactacagacgtgagccaccccacccagcctgtcctcttttttcctacatgtggagcttgctccaaaagaaatggaaggtaaatgctggtatctcctccagctccttctcccagtgcaatgagggacacttgaaggcatggcaggggcaggggaaacacacagagagtgtggcagctgaaggtacagccctggcctggccattctttctgtggggccccaagaacgctggcagacaacacggagaacttggtggaatgtcagagacagcccacccaaagtgctccatttcacagatgaggccactgagccttcaggactggggggtgcctagattaggccacccagtgagtcaaggactgagctgacatgggcatccaggtgtcccattgtggtcatcaccatggcctgcaaggacctcttgttctgatatctctgatctcagtctttcccactgccccacccctctctctttagccttagagatttcagcccttgaatatttcacaaacaccacaggcctctcacacctctgagcttttcatgttgtggggcctctccatggaataccatcctatatcctacctccttcttcactgcctctgctccaggaagccttccctgattctcaggccaggtccagtgcctcctctgggcatccacaatctctttatcacagctctgatcacatcaggtggtaacaatggatgtgtctgttctccttccaaactgccatctctttcaagccagagccagacacacagcggtgctcagaatgtttgcataatgagtgcataaataaatgaatggtgaatgaatgaattctccagatgcacaagtctcccagcctgtacatggaatgcaggtacttggagaaatgaggtgaccccagaagatcaagccttaggaaagcggaggtcattcccttccccactacccccagtactggagtctccaaagtccaaaggggacagcttccatgtgagcagggccagagaggtccaatgtgcattgtgaattgacagccagccacacggctctgcaggatgaagctgcttaccccttcttgaattttttcccctatttattccccactgcctctgctctagctagcctcgtgtttctcagactcttgtcactcatcctgcggtttttgctgttctctctgcctggaaagtctttccccagatttggggcttgtctcccctcgatgttgcctcctcagagaggccccctgtgaccactccagtaaaacgcaccaccatgcactttatcctcttgtcttgctttaccctccgtagtacctgttcatgtctgtcagttcctgtttgcttgtttgtgagttccatgaggacaggaatcttctattttgtccctatgtgccttacactgcagtgattaagacatacttgtggaatggatttttttaaaaaatgagtgaatgaataagcactcattcatccatagattcattgtgggacctcaagtactttctgttctcttaggctcaatttccccagttgttcaatggcacagatgggattttgtgttctgtgagagcccctttagtgcttccagaattggatatttctagggttctaaggcccagaactcagggcccttcataccccaagatgctcagagggtgtttggttctctaactatgggggctgtctgggcatcttggcctgttatccagttcccctaccccaatacaggtgcccagggaggctagtgatgctgatggcatgctctggcggggggcggggaggggtgcacccaagggtgtcagttaaggcaccattgtcacaaatagatgaagacaggtataatggctgaaacacactaagctcacagcatgtgttcctgatcagcagatccttctctgtgggatagcaggaactcagattcctttcagcttgtgttctgccctgttcagtacctggtttaaagctcaccgagaagggcagggcttatgggaagtacagagcctgtctacctatgtcccattggccagaactcagacacacggccacacctacctgcaagggtgactgggaaatgtagtccagccatgtgccagacaacacacaggaggaaaagcaagaatttggtgaacatctggcccattgaccaacgttgggccaccctcatttcttgccccagtcatgcagtagctccttcctgtgtctgctctgacccctacaagctcttcttaagcagccagaggacatgtattattcatcgggtgaagaccaaatttctcctcagagatgcaagggctacgtgatggcccctactagggggccatctgctagggtgaccagctgtctggtttgccagggattgaggggcttcctaggatgcaacgttgacctgtgtgtagccttgtataatacaaccacaatcaagatatttaaacatacttaaacaagatactaaaacatcatcacaagactccttcatggtatccatttatggctccaccctccctctccacttccagtcctaatccctagcaaccgctaatctgttctccatctctgtaatgttttattttttgagacagggtcttgctgtgtcacccaggctgaagtgcagtggcacgatcatggctcactgcagccttgacctcctgggctaaagcttctcctgcctcagctgtgtagcctggactacaggtgcatgccaccatggctggctaattttttattttttgcagaggtgaggtttcgccatatttcccaggctggtcttgaactcctgggctcaagtgattcttccacctcggcttcccaaagtgctgggattataggtgtgaatcaccacgcctggcctcccatctctataactgtttttacataaatattgtataatggagtcatgcagtatgcatctttttgagatttggctttcttcactcagcacaatttgtttggagattcattttagttttgcatgtattagttatttgctttttactgctgagtagtattccaccgtatgaatgtaatatagtttgtttaaccattcacccactgaaggacatttgggtattttctagtttttcattattaagaataaaggtgccatgctcacttgtgtataggtttctgtgtatcctctttggtgaaatgtctgtgcatatctttcacacattttaaattggatttttacattactattgtgttttaagagttctatgtatatattctatatagaagttctttgttggttacgtgatttgcaaagcgtgagatttatgtcaaggttcattttgtatttttgtttatttttttatgtttttgtttgtttatttttatgttcgtttttaatttttgtttatttcgaggttcattttttatttttcgtctgcggatgtccaattgctccagtatgctttgatgtaaaagctttatcaaaaattaattgggcatattggcatggatttattttggggctgtctcctgtattccatgggctatgtgtctttctgtctaccaatactacactgtactgattactgtaactatataataaatcttgaaattgggtagatggatccttcccactttattcttctttttcaaaattattttagctattctagttcctctgccttttcatatatattttagaataatcttgtttatatctaccaagaatcttgctgtgagtttgattagaattgcattaaacatgtatatgaatttgggaagaattcacatctttactatattgagtctttcaatccaaaaacatagtatgtctctccatttgtttagatcttctttgacttttttaaataaatgttttgtcattttcagcatacaactcctgtgcatgttttgttagatttatacctatttccttttttctcccttagaaattatacatggtattctattttaaattttgctgtccgtgtgttcattgctagcagatagaaatacaactgatgttcgtgtgttgatcttgtatcctagcaccttgctgaactcatatattagttctaggagtatttttgtagatttttttgggttttgcaacattgacaatcatatcaactgcaaatagcgacagttttctttccttctgatcttgtgccttttgtttcctttacctgctttatcaaacttgctagaacttccagccatatgccgagtaagtgtgatgagcatagacatccttgttctcaatcttgcctggttcccaatcttagtgggaaagcattcagtcattcactatgacattagactgtaggacttttgtagacactctatatcaccttgaggaagatcctctctattgctacttttctgagcattttttaaaattatgaatggctgttgaattttgtcaaatgtttttcctgcacattggtataatcatttaatgtttattctttagtctactgatacgatgtattacattgattgatttttaagtataaaaccaacctttcttcaatggaataagccccacttggccatggtgtaccattctccattatatactgctgaattctacctactaatattttgctgaggatttttgtgtctaaatccattaagaatattggtctatatttctcttttttgttctgtctttgtctggttttggtagcagggtaatgccagccccagtagcaccagaagaacaaggcttactagaatagaattgcaagggttccaggccaagtgcggtggcctatgcctgtaatcccagcattttgggaggctgaggtgggcggatcacttgaggtcaggagttcgagaccagcctggccaacatggtgaaaccccatctctattaaaaatacaaaaattagccacgtgtggtggtgcatgccagtaatcccagctacttgggaggctgaggcaggagaatcacttgagccctggaggcagaggttgcagtgagccaagatcgtgccattgcactccagtctgggtgacaagagcaagactcctctcaaaaaaaaaaaataaataaataattgcaagggttccaacaagtttactgtcattggacctaaagcccacaaaagtaaacgagaactcacatgctacatttaaacagggaaactgctgcctgctaaactaaagtatgaaataagacctgaagttccaactgatgctaatactaaaatgactcagatgttgaaattgtctgacaaggattttaaagcagtcatcataaaaatgctttggcaaggaattatgaaatctcttgaaacaaatgaaaacagaaaatctcagcaaagaaatggaagttatataaaaggatcaaacagaaattttagaaatgaaaaataccataactgggggaaaaaactttgctaatggactcattagtacagtggagaagttcagtgatggacaaataccccaactctctattgaatgggcaggatggccggacacataaaacatgccacgctgtctcctgccacaattccccagccctgccatgctgacttcagagggactgagcttcagttgcccacggtgctgtctgggtaacctgtccttcatgggctgcctgcccttcctgtttcactccttatgctccatgctatgcttcttgggatcaattctcaaatcaatttcttgaactcaaatccttgtctcagggttggcttctggcaaccccaaaccaagactaattcttactaattctcatgacaacctataaggtattacaggtaaaacatggaacagcacctaacccagagtaagttctcactggtaactttcatgattggtgcctcagttttgttatgtataagacagaggcatcgaacccctcaccctcttcctctggacttcttcttgttctcctcttaaatcaaaatctctgcaaacccacctttgttctttgttttacctgttctttcccaagggaaggcaaacagccttctccctgtaggatgctcaggcagacaaaggagctgcttcaagccagcgcccctccctcaccaaccccagtggaatcccagcctccacagtcagttgggttgttgttttttataataccagtgtgaaataaattgaaaaattacccataaaatacaggttttcagcagctggcctgaaatttctttccataaacaaacaagtttaaagagatgcctgatgccacccgccaatcccaaacttttatgtccccatgtggcagtggggtctgccgggagatttggcctcctgggcaaaggcaggctgctgggggccacaagtcacccctaggtctttggggctgacttgtacttctcaaccgtatctgtctgctccatgaagaatcccccagactcatccctcatcccccagctcctacactcagcatagacttgggagccaaactgcctggatttgaatcagagatttccacttattcagtgtgacttcaagcaagttacttaatctatctctgcctcagtttccccaactgataatgctgataatagtagtacctacttcataggattgtttgtggattaaattagttaaatatacatgaagttcttaggacatggcacaagaccatgctgtataactgttagctattattagtcgtccaggaggaagaaaaactaggatggaagctacagcaggaggcctagtgacattttgattttcccacaataagctttctctggagtttccttcagggtgtttacataaatgcctgtccaacactctgcagtttgcaaagcttgctacatctgctatctcatttggatcaacatttaagccatggaaggagttaggacagaggttgtgattatccccattacccctagtttacagaagaggaaactgaggcccagtaggtgaattgacttgctcatgatctcaagaaggggtagagccaggaccccatttctgtagcttgaggatccgggacgcatcttgattcttgtcacacactgaaagcaggtcagagccctcctgatcctgcatcgcacactgaagcttgaacctcatcctagaccacaacataaccctggtctcaggtggggctctgaccccatgcttgaccacagactgaagcccagattaagcctcagtatcggtttgagtcagaactctgaatctcgcttcacactaggccctgactccagcctcagactgattcctgatctttgttataggctgagtcctaatccaggtcccatattgactcatgatcgtgattccacactgtgccctaactctggccccagactgagcccccagtgggagcctctaacttggaactccatctctaaccccatcttgaatcttttgtataaatccaattgcccatcttccccaggctttggtccatctacctgaaaaacagagtagggaagaaagtgctcagcaccctttggagaaggcccaggcaccagagcagaatttacaatccaccacaggaagcaagaccctcatctcatctcctgtgtttgcaacttcctccaactccaccccagctgggacagcctcaaagaccccagtcctcctgacgccagaactctgaggagttctattgtttaggtggttttcggttttgattatttaatacagtcatttctggttttatattcacagctttggtcagctgggatagggtttttcttcttcctgtggttgaagttgtaacactatttcaaacaaaggaaaaattttaaaaacaacagtgaaaatattttcaaaatatgttcacaatcaagttaatttcttggtaattggctggggaagagaagggaaggacaaagagagatttttcataatgaagggacagcagttctctggtgggctgggggacagcagggtgggggccagccttgggtctcagtctacacaaaggtggtaatgggctgggggagatagggattgggagctggacccaggacagtggatgagaaaagccaaggtcaggcctctaaatgtcccactctggagggagttaggacccggagcctatttttctctgtgtgcccttaattctgggcctcacttttttcatctgtgaaatggattcaataacacctgcccaaggaggactcttgaaattaaaagacaaggtggctgcaaagcacccagcacaaggcctgacactgaggtgtacaagtaatagtagttgatgccatcattattatttgtattcatggtttgccagcccagaggctgtagaacctggtggtacagggaagcctgagtcagacaacctggattcaagccccagttgtgccacttactacttatgtgacctccggcaagttgctgagcctctctgacctttggttttctcatccataaaatggggatagtaactgagttgttgtgaggatcgaatgcatgactgcatgcaaagcacttagaactgtgcctagtgcatagtcagtgccaagtgtcagctactactatctgctcaaaaatatttcatgcatacctactacttgcaggttgtgaattgattgattcttttttcattactaagcactaactgtgtgccagagagcagtgagaaccgaagacacagtagcttctatcaaggccctcatcgcctggtgggagactgagaaggaaagaaggcaatgatgacaaggtcaagtaagttctaaaatccaggcacaggggaggagctgtgggagcctaggggcaaggccagagaagggttcacaggagttaaacattcattcattcaacaagtatctactgagcactggcccaaggctgaggattcagccaccaccaccacaggtccacatctggccttcctggagcttgcagcctagccggggagacaggaacaatgaagacacacacacttagataacatgatggtggtgatggtgagtgccgcgatgaaaaccaaagccaggggaggggatagagaatgacagacatggtcaggggaggcttctctgcaaggtgagcagagatttggataaagtgggggaacgagtcctgtggaggtctggggagggcattccaggtggaggggcagtaaatgcagaggcccagaggcctctccatgggctaacgagggaggcagagggagggagggagtggagggagcaagggtatgtgtaggagggaagcagggcaggagtgggagcacagtgactcgcctgcatgtattcccaaggagatgggaaggagaggcgagcagaggggtaaaggagaggaagcaggagctgccacttttgagaagcactgagaagagaagcagaggtgggtggggagggggatgcagggccaggactggtgggcaggggccctgcaagccctgcttactggaacgggagaaggctgggggaggtgttccaaccttcacaagccacaggcaaccaccgagtgacattagacagggaagggatgagatcagaccctggcattagaaaggctggagttctgggtccttcatgctctctcccttaattcttacaagaacccatttcacaggtggggaaaatagaggtcccagagaggttcagtgacttgctccaggtcactctgaaaggacacagatctggctgcctccagctccccctgctccttgagttccctgctgtcttccctggcctctgcctctgggcccaagaactcccagccctcagcatccatggcctccccctggcccacgaagtcctcagccacctccttcctggagggctcagccaaaatcagactgaggaagaagtggtgggcacccaccttctggccttcctcagccccttattcctaggaccagtccccatctaggggtcctcactgcctccctgcagccccttgaaacttctgatcattcagctcctgggatgtcctgggcaaagttatccaggcccaggtccctggctcgtggctctcctctcattccctcagtgggtgccctgcccacaccaggattgcattcaccatccaggtgcttgctgactcgggggcaggctgagtgctgatgagttaatgccccccaggagcacccctgagtggatgaggatgggagttggtggaaaaacatttcagtcccctcgccccttgggtgggacagttctgttgccagagttcccagtgggagggatgcccagttgccaacttgatccttatcacacctgtgcttgcttctttgggactggcttccagggaatctatttggacgggaattcttgtttccaggtctgccaagataactgccaagcctagtccattctacctgcaaaatagctctccaacccttgcctctgtgactgccaggtctgccgcagcctcctgcatctctgtttgtactcgtgtaaaggccccccaagctgtcctcttgttttgcccttgcagtctacccctcctccctcccaaggagccaaaggggttgggttttaaggaaaacctgaccatggctgcctgctgttctcaggctaaacagcacccctgcaaggcccacaggcagcccacctaaccgtttctctacatctctgccccaagccacactggtcaccttcccatttttcaaacacatctacttatcaccttctcagggcctttgcacttgctgtctcctctggatggaacactcccagtctcccatggttagctcattccaggcttcagttcaaatgtcacctcctcaaagaggccttccctgaccatgcgatggaaactcccatccttcaccactacgcttggcttagccctcttagctttgcttcctctcctttgaactgtttcccatgatctgaactagccttgtttgtttgttgtgatgacgattgagccccccaaagcagagaacttgtctgcacacactgggcatctggctggctgcgggtgttgagctgtgagatcggctatgttcttgccctgctgcagttgaccgtctggttggacaggggctggagggatgaaccagttgtggaaaatgccacaaaggaagaggagtaaccggctgcagggagagtgggagggcacactcacttgggtgggtggattctgtgtaagaacagggacctaccaaggtgggcagatcacttgaggtcaggagttcaagaccaccctggccaacatggtgaaaccccgtctccactaaaactacaaaaacattagctaggcgtggtggggcacgcctgtgatcccagctacacgggagactgaggcaggagaatcgcttgaacctagaaggcagaggttgcagtgagccgcgatcatgccgctgccctccagcctgggtgacaagagtgaaactctatctcaaataaataaataaataaataaataaataaataaataaataaaataaagtgcggctgcatttgcctcccagggcagcccaggtgtaagctatacagcttggtggaatgtctccatggcttctaggggatggcccaagagagttccaaacacatcatattccagtgaatgggactggtcagcccacagccacatggccatgtccagctgcaagggaggctgggaaatgtaatattctgcaggccacccatgtgctcagataaaaataaagagaatattattcaagagaaagggagacagagtgtgggggatgactgatgatccttgccataagcatcagcaggaaaccaccagcccccacttccctgtttctgcatgtctgttatttggtccttcctgtgtgtgatggagggaaagatggctgtgtgtgatggaaaaaaagatggtcctgaatgagcctgattccacttctgggttcccacaccctctggtaattccctcctttcccccgtttctgccctgtatctcctacagtgtctccagccctccttcactccatttctccctctcatcatagactgtcttggaagttctgcctacaaatgtggcagctgctgtcccactcttctctccatcccctctggaagcctggcctctccccaacttcctgctctgttctgtagctcactcagcgaggaccagtccctctctgtcatgagatccactttttctctccaacctccctgtgggcctctgtcctgtcaacatccctcctgacactctctgtgacatttgaccacctgctggaatcaaagaatgtgggctctgcaatcaggcaggacagaaatgaagatgcttcccctttctcagcctcaatgatctcatctgtaaaatggtgtgaagaatgtccactaactaattgaaacaaatttttatttgcagccatgacataccatgcatttaagtaagcccatatgagcacatctgaaggcagtgataatacaatcaataatactactgggagtgcctagctcttactgagtgctaagctcttcagcacgtcagctcagaaatgtggcccctcccatggccccgcctgcactcttttctccttttttgcttaacttcccttttgttgcttctttcttgagtccatttttggctctgttctctcctcatctctgcagctttcccaaattcttttttaaatttttatttatttatgtatgtatttattttgagactgagtttcactcttgttgcccagactggagtgcaatagcatgatctcggctcactgaaacctccacctcttgggttcaagtgattcttctgcctcagcctcccaagtagctgggattacaggcgcacaccaccctgctcagctaattactgtatttttagtagagacagggtttcatcatgttggccaggctggtctctaactcctaacctcaggtgatccactcgcctcagcttcccaaagtgctgggattacaggcatgagataccacatccagccagctctcccaaatccttttcccagctctgacatgttgccacacttcatctacctggctggacacctccacttgaagtcctgtggacatctcaaacccagggtgtctaaaatagaactcagcctcttcccctgcaggcttccaactctggaaagggcccaaccacctacccgctgggtctgtgagccaggccttcctctcaggcccctcctctcttcccctggccccagcctccttccccacttccccacccttccccaccccaatgcacatacagttgctcaattgctagtcctcacatactgcattgtgtcaccccacctggtcattgtcctgcccatgtcctctcagcactcacctttccatgtccaaggagtcttctgcaaacatctgcaactgtctgaagccaaggtgctggagaactaagagagagtccccaagcagccctcagccaatgaccgatgggaggtggtggataaataccagccccctgccctgagttgggagacctgaggtgtgctcttcactgtctcaagaggacctcaatggggctgagctcccgttgcccatattagcaattcacttattatgcatcagtggcttcagtggtttactgcagtgtcttcattgtctctgggccacataattttatggaagtcacagcccttctctctaaagtccatctatgaagccactttacctctgtttgagaagcactggtctccaggatgacatctataccccttacctggcattcaaggtcaacctgctgactccaccatgtgtctacccttccatgctttgctcatgctcttccctcctgcctgaaatattcatcactttgcttaatgcttgtctgagttgcacctatccttcaagactcagctcaagttcacttcctccgggaagcctttcagaccacattaatccttcgagtgttccccacagccccaagaatctgctccccacatgtggcacaaatagtgccttgggtcttacctggtttgttccttcagcaaaccaaggttaagttagcattttctctgtgcaaggccctgagagctgggagagctggagacatgaggtgagtcaacacagaccctgctctgaggtctgggcagtccagtcgaaagacgtccaggacatggggttgggcattccaggcaagaccatcaactctacgaggaaagggatgattttaattcactatgagaaatgagtgaatcatttattttcttagcttaaaacagggggtggacaagagactgactctggcccaccatctgtttttataaataaagttttattgaaacacaactatatttcttcatgtatcacctatggcctttacactacaatgtacgagtaattgtgaaagagaccacgtggaccacaaacactaaaatatttactgtttggacccttatagaagttccctggccctggcttgaaacactaatacttgtttattatttcacacagtttctgaaggccagaaatttgggagtggtttagctgggtggttctggctgagggtgtctcaggaggttgcagtccgcagggctgtctgagtctcatcataacacagcagctggtttccccagtgaagacttccatgctaggcacctcacacacagcctcatttaatcctcataaacatccttaaaggacagctatgattattacctacatttctcagctgaggaaaccagagctcagagagaggaagttatttccctaaggcaaggacagacctaggactggagctcaggttcctctgcctccaaagccccgctcctaaccactgggctgtccttctgagcaccacggggtcccagcaaatgatctgtggctggggatccaggatcattgtgatttgactcagatgtccctttgccagggatatggtcctactctccctccagttacctgctccacaggtggggtccaccttctttcagaccctctatcaagtgagtcaatggtactgtccaattccttcccaatatctttgccatccacccccactcttttccagccccactgcttcggtcttacctctggccgtctgggctcccatctagagacaaagtcaggggaggtgatgctttctgctgatattccttgattttttccacctgattcactttcagctctcctctgcccatcctctcagaagatggatatgcaaaaaatgaccccagagccataggaaggccccaaatgcatcccaaagtactgcagatgatacctcctgatcaagccctgctgctaatcaatcaatagaattaatataattatacaatttcatttattcagccttctaccttcacaaatgcctggaccttggtttcaggtaaactggctcgagttcctgcttggtctttgccaacatgtgtccatgggcaggtcttagtctttcctttggcctcagcctcctcatctcaggattgctagagggggttaaaggacattgcattgtaatttgcttgttttcacacttggtacataatacttgctagaaccatgatgcaaagagcagtcagtccgcatgcttataagggaagcaaagatgttcagcattatagaatgcatggctaacatggccccaagatggtccaatggaaagctcttcttctaatcaaatagtgaacaatccaggaataaccaaagaaaaagttcatcttattatttgttttcacagcagctccatgaggcagaattaattttgtgtgttttgcagatacgggaacagtaggtgagagcatgagtaactcagctcaggtcacacagcaggtgggagagaactggaacaagaacccagtgctctttctgctctacccactgacccatcctctcacgcatcatacacccatactcccatccacccaccttcccattcatgcattcacccattcacccaccttccatccatctaccatccaccacgtacctacactcccatctaccatccaaccacatttccattcacccatcctcccatccatcaaccctccaatccaccacccacagaccttcccatccattcatttacccatccacatattcacccaccctcccatccatccatctactgtctatcacctactcattttcccatctgctattcacccccaccctcctatccatccattcaaccatccacccaccctcccatccaatcatccactgtcccaaccatccaccatctacccatctatccaccactcaccctttctttcattcactcatcctcccatcctcccatccaccatccaccctccacccaccctcccatccaatcatccactgtcccaaccatccaccatctacccacctatccaccactcaccctttctttcattcactcatcctcccatcctcccatccaccatccaccctccacccatttatttgacagttgctgagagcctactaaccaccaatcactattccaggcactgagatatgactttgagctagacaaagtcttgcttcatggagctcacattttggctgtgaatggcagcaacagacaaataaatacgtagtttacgtgaggtactgcaaagaaaaaataaagcaggggagtgatgtcaggagtaactaaggcaggatggtagtcagggaggtcgtctctgaaacgggacatttgagcagaagcctgaaggaagtgagctccctgacaacttgggagaagagaatttcaggcagagagaacagttgtacaaaggcccagtggtaggaatagaaacagcttgatgggattaagaatcaacaaaaaggtcattatggatgaagcagaatgagggaggaaacccaagccagctcgggcttgatcatggcaggctttgtcagtcactgtgagtaaccagactttatttcaagtgagttggccaacagtgtctccccagtagtagagtgattgctcgtctgccagaaaaggggcacagagctctggacatcaatacttgccgatctctccttcatcagccacccaaccctggcaacagttttcaattacacctgtgaaaacttgtgggttaaacagctgagatccatgcctcagcttctataggtgataagcctgtccttccttaggtaaagaaaggaaggggcgaaccgtcagtgagcaccattcacataccttagccggttcagcttcaccaccctctgaaggtgccatcagcagctcccttttgctgaagagtaagcggaggcccagagaggtcatgtggtgtgtgcttgaggtcacatggctgagaggtggcaccagatttgcccaactctcaagtcccatagtctaacgtttcactccactcagattcaacctcccaagaaattatttgtttgagtacctactaggcaccagactcagagtgagaggcagttgcagattcactcagggccagttttggaggccagcttcacaatcacccagcacagcccatctttctacttgtgaggaaacagaggctcagtgaaggaatgcctttcagatcacagagaggatgaagccaggatattcaaacccagcttattttactacaactctatatggtaggaaagagaaaagcgcccatacaatttcagtggcttgacgtggagcctggcaacagatgtgttcttggactgttggctataagacaaaccagctttccccactgactgtcaccgtgttttgggagacaaagcctaggactttggtgtgtccaccgtgggtcaataaatgcccccaaacaagcatatcttgcaaaagtggggacttattaattcattgattcgtttcttgattgatcaattgatttatatgtccctgttggacaaagggtttgaggcagcctgggaaggaagtgaagtgtggaaactggtcatcttctgtgcttcttacattccactcattgggaacatcaaaaaatgaaaaaaaaatccagctgctacatagctggggaacaaattcttggtatggaagtaattctgctaaggctagcctcctcagagtaattccaaatgcttttcctattttcaaatttaattaggagacatttctgtagtgtgagtcatcatttaataatggggggtgtttattagggaatgagtggaaagagaacaggacagctggataattcaaatcccagttcttcaagtctctggctgtgtgatcttgggtgagccacttcacctctctgaacatcagttttcttgtctttaaattgatatttacctggcaaggtttggggaaggtctcaactagattatgtacataacaagcttgccagtgttagtacataataggtgtttaataaatattaactgccttctcttcccatttattttcttatttggtcttctaaacaaccttggggaccatgataggtatgttgtttgctttctctagcatgaaaacagcctcccagaaactactcagccaatcctctgaaatggtatttccggtcaaatctgatgcaccttctgagacttttttttttttgtcttttccagtaaagccaagcacatagtcattgttagttttaaaaaatgtatttggatggggtatgaagttcagaagagaaagacattcctggttgggttattcaagcaaggatccctgaagaagagatgctagcatttggctaggtgataggaaggggacaggaaacagcaaaaggcaggatgtggaggcagaatgagttgaaagatgctgttattgaaggcgatggtggtagtttatccctgaaagccaccaagagctcaagagcaggagggaagaagatgagtttctgttgaagaaagaccaaagtcactcactggctgatttgtgcttgggaggagcatctctttcccctgctgattgggagtcttttgtttccctgggacaataggcactggtcactgaagagtgtgtctgtcctccacactttcccatgttcctgtctctggggaactcctccctgactccgagagacaggatggagttgtcaatcaagatgtctgtcactttgcctaccaggggagagctttccaagtggggccctgtttttctgctggggctataggggagggtctccatcttcatgtgtcaggatgtagccttggggctgctggtgtcatatttatgccacatggaatgaagctgtctgaagcaggaaaggatgatattaccaagcaaaaagagatgcaaagctgagtgtggacggaggcctgcttctgatcctgtccatgtacttggatcaaaccatgcctgaactccatttggtttgcaccttatggggcaataagggaataagtaattctctttgtttattcaacaggatttctgtcacttggcaattctgattaatacagacttctgattaatacagttggcaaatgagagacaagtgatctcttcagaaatggacagagcaggaaaggaacccaccaagcatggagaggttgaatgagagtctcttcttccccattgactcactgcagccctggatcaggttgctgcccttctctgggactcagttttatcatctgtgaaatgggctgcagtgagtgggaaacaaaatcatttatttatgcccaaccttgttgcaaaaatgatttaagacagcttacaaatgtattaaagccagagattaggaaaagaaagagataatgaaattgtgagaagggggagaaaaggtgaactcaaggatgaggttaggttattgaatgcctgctgtaaagttctggacagttgctaaaggtgaacagacaagtttgttctgagattctttgtagccaaagcaagaaaaagaaaatgcagttacgtggatttgtaggaaaaaaaaaaaaaacaacccggttcctgagaagaagcccaacttttcttagaataaaagtctgaaacaattttccttgtggttccccatcaaaaggactttgtgaaataccatgagcaaatataaaaaccagacaggttgagtatcccttatctggaatgcttggaaccagaagtgtttcagataacagattcttttggattatggaatatttgcatatacagtcctacctcgggtataggacccaagtctaaacacagaattcattcatgtttcgtgtataccttatacaagttacctgaaggtaattttatttttctgtgtgttgtgcacctgcattttgactgcaacctgtcacgtgaggtcaggtatagagttctctacttgtggcatcatgttggtactcaaaaattttggattttggagcattttcaatttcagattttcaaattacaggtgctcaacatttaacaggctggggtaaatagttgcaacatatttaatagtcggaggattaaaatccacaataaaataagagctcccacaaatcaataaggacaaaggaaaaaaacactccatcaataaaatgggcaaaaagggataagaacacaattcacaataggggaaatagctatcaaattagaaaaaaatatcagaagaatgggtaatatcagtgttggtcacagtgtggggaaataggcatgctcagacaccttaacttacttttagcgtttctcgtcacctgacacaccatatatatacgtctctacgtgttggggatctctctctctgaccagattgcaagttccatgagagtaaggactacctcctcatcactgctgaattcccagaacctagaacagtgtgcccagaacagagtagatccttgataaatatttatcaagtatgtgagtcaataaataaatgagtgaatgaatggacagtgtgtaaactggggtcatatatttggcaggcaatttggcaacatttattagaatgaaaatgcacaaacactgatgcagacattcctcctttagccatacgctcgactgagacatacaaatattcaaaggaatgggtcaaagagtgtttttgtagtgctgtttaaatggcaaaagttggaaatgacctaaatgccaaacaatactacactaataaagttatggtttattctgactgtgaaatattgtgtgttcttctttaaaaaaatagtgttttcatactgatgtggtcagatctccaagatacattatcaaaagaaaatagcaagtcacagaacaataatatgtaacatttacggtaaaaacaaaacaaactttccaggcgcagtggctcacgcctgtaatcctaacactttgggaggctgaggcgggtggatcacgaggtcaggagattgagactatcctggctaacacggtgaaacctgtctctactaaaaacacagaatatcagccaagtgtggtggcacgcacctgtaatcccagctactcgggaggctgaggcaggaaaatcacttgaactcgggaggcggaggttgcagtgagtcgagatcacgccactgcaccccagcctgggcgacagagagagactccatctcaaacaaacaaacaaaaacaaacaaacaaaaaacaccacaaacaaacaaactcagtctgtctggttagctagctactatctatccatctatctatccatccatccactcgcttacattggtcaacctatcagtataaacaaatagaaacatatctagaaggaaataccaagctgttaacagttcttcagaacaagggaataaaatgtggaggtttacacaaagggctatttttactttaaaaatatatttcagtataatatgcacttaatgtgcatagataggttggcaaatgataaagctttacaaactgtatttatccctgtcagcatcactcagatgaagaaagagatatgaccagcaccccagcagccctactgttatcctctcaaggaaaactatcactgcccttctattacttttatcaccctagactagttttgctaatttttggactttatataaatagaatcaaaaagtggatacaattttgtatctttcatctttggtgcaatattctgtttatgtgaatattgccaaatggcctgacactccaaccagtgtggcagaaggcctgttccccccatgcagccacccaatacattttaactaacctgtagtctgtattttgttcagtcccagtaatgtcctttacagctttttttctagtttgggattacatgttgcatgtagttgtcatgtctctttagtatcctttaatctggaacagtttctcagcctttctttgtctttcatgatgttggcctttaagaaaaatataggttagttgttttatggaatgtcacatccctcactttgggtttgtgtgatgtctcctcatgattagactgaggttatgcattttgggcaggaatatcttgtaaatgatgctgtgttcttctcagtctatcacattaagaggtacacaatgtcaatttgtccctttattagtgttaactgatcatttggttaaggtgacatccagtttctccactgtaaagttgtttactttttcttttgtaattaaaaagtaattttaggaagctactttaatatctttatctattaaatatccttttccttgtcaaagccatggtatgtttaaaatgtgaatttctttctaagttcaggggtacatgtgcagatttgttacacaggtaaacatgtgccatgggggtttgttgtacagattatttcattgcccaggtattaagcctagtacccattagttatttttcctgatcctctccctcatcccacgctccaccctccagtaggccccagtgtgtgtcattctcctctgtgtgtccatgtgttctcataatttacctcccacttatgagtgagaacttgtggtatttggttttctgttcctgcattagtttgctaaggataacggcctccagctccatccatgtccctgcaaaggacaggatctccccttttttatggctgcatagtattccatggtgtatatgtaccacattttatttatctagtctatcattgatgggcatttaggttgattccatgtctttgatattagtgctgcaatgaacatacagttgcatgtgtcttcatcatagaacaatttatatttcttctttttttttgtttgagacagagtcttgctctgttgcccaggctggagtgcaatggcacaatctcagctcactgcaacctctgcctcttgggttcaagtgattctcctgcaccaccctcccaagtagctgggattacaggtgcccaccagcacttccggctaatttttgtatttttagcagaaacggggtttcaccatgttggccaggctagtctcaaattcctaacctcaagtgatctgcctgccttggcctcccaaagtgttaggattacaggcgtgagccaccgcacctggcctttacattcctttgggtatatacctagtaatgggattgctgggtcgaatgatctttctgtctttaggtctttgaggaatcgccacactgtcttccataatggttgaactaatttatactcccaccaacagtgtactgagcattcctttttcttcacaaccctgctagcatctgttattatttgattttttaatagtaaccatcctgactggtgtgagatggtatctcattgtggttttgatttgcatttctctaatgagcaatgatgttgagctttttttcatataattgttggctgcatgtatgtcttcttttgaaaaatgtctgttcatcttctttgctcacttttttaatggggtagttttcttgtaaatttaagatcctcatagatgctgggtattagactgtggtcagatgcataatttgcaaaatttttctcccattctgtaggttgtcactttgttgatagtttcttttgctatgcagaagctctttagtttaattatgtcccatttgtcaatttttgctttcattgcaactgcttttggtgtcttcatcatgaaatacttgcccgtgcctatgtcctgaatggtattgcctaagttgttttccaggatttttatagtttgtgttttataaaatgtgaatttcttaattgagagtaatgggaagcatttattcctgtgctcctgagtcaccggttttcctttttgatgaattttgataatcattttttctcactaaaatttaaaggtttaatttttaaaaactgaatggtttaagcttagccctatagttcttgaaccatgattttaataataatgattttttaatcttcattgctctagcacctttaagaaggattcgtttgaaaattcacctgtgtctcaacccaggaataggcttggccttccttctctgatggcagccagggagcttcctcccatataccgtgcccacgggaaggaacagaaatgcttcctgtcactcccaggggtctccagctgtcataagctgccagctggaggtggtccaagccaagattacagccggcctttatcctatagttatcacccacaaatcaccccctatccccaacccaggggagtctctctgtccattccataccccggatactgaactcagctccagaaccagggacctcctgcccattcacgatggccttgagctcccagtgctgtccccaccactcaagattgtcccataccacctttcccacccagcccaaacctcacaagccaggtgcatgtggtggcctctagggaaatgaggtttcaaggtattttagccacagatctctttgctcaaataaagccctacacagaaccccagcccattcaacatttcaaggtggagctgaaatcctttgtgggttctatttttctctctttgcaaagcatttccagcttgtgggctgattgtcatataatctagacaagtgttaattaaagaaatcactcagagcctgtatatacaaaaggtaaaaattttaaaatctttacagctaaaaatatatttaatgtggtacatttaaaaatatttgatacaaggtggggatcccaaacaaagagtgccaggggcctatggtgagccaacctcccacacctcccaaataaatcagtcatctggctttgtctatctctacgctcttcctatgagtgttatcacactcaaattgcatattgatgggattaaccctttaaggtctctttcactccaccattggcttagtgaggcaatctagtccatcattgtctccccagctctgagaagcgagcactatcataaaagaaaagaactattatacaagaaaagattgctacagtgaactagattaatgttaacaggctccttgaggtaagatgctaaaaagcatcagaatgaatgagtgagtcgataaatgagtgaatccacactgttgcttatgaggtctgtgggtgatgacgccccatgtgcatggcagtttcagaagggctttcagggtttagattctggggaaaggaatccacttcacagaccctgctggtgccgagccacttctaagagaccaaggagcctggagccaccccattcctcccagggggtggggttagttgatgctgtctggtgagtgaccaatcgcatcagcacctctgctgaccccatgggactccgctaccttctctcctggactcctaaaactgccatttctctgagagggggaggagggcttcttgcttccaaaaggactaagcagggttctggcaatggggacaggatagtcgttccctgtggcaggctgatgtacaatgggatggtcctggggccacatctgggcacagacccccattatctttaatggtgctcttgccagggggacactgcagagaggagtctaccacgaggagacctgctctcccctcccaagcactggagcaaccttggccctgcccagaaaaaggcagctgtagggaaatggagctgagtttaaatgcccactgggcacttagtagccatgtgaccttgtgtaggtgactcctcctcttcctctctgggcctgagtttcctcctccataaaatgaggcagtcatctttgcagctctgcacccacaaagtgccattgtgagggtcaaataagtggatgtaaaagggcttgcagagaaccctgcagatggaaggtggacctttataagggagaaataaaatcttattaaggagaaaataaattcccaagaatgagctgcccagcatctttaaaagaagactgcagagtggacagtgctcatacctgaaatgttttttttattcctctaccagtcagcctcctacacatcccagaggaggcagtgccttccccagaaagccctgccaggctgcactctgtcctcccatcctgctgcctccagcacaatgctcatatctgactgtctgtctacctgacatctcccccactggtctggtgctcctttgggaaggaactgtatctgatgcaaccaggaatttcagctcttagggcagagtctggcgcatctgaggcacacatcaatattctgagccagactgactggctagagtagagctaatggtagaatgtcgggggctggtgcctaaggttggggtaactaaagacgcaggcaagcctcacactcccttcctagaaccttatctgattactttctccatctaggtttgagacgaggtctagccgatcctgcctacaggctgagtgaaagctctttaaggtaggggtgaccagcttttcctggtctgctcaggactttcctggtttgagttctaaaacgtcccatttcccaggtaaaccagggcagttggtcatgctaccttagttactaattgattctcatagtagacattgtaattactcactgattgtatattacgcttctccttcctccccctttcccaggctggcagagcccatctcttaggacagaggctgaaaacggaagatagtttcccagcctctcttgtggtgaggggttgccatgtgaccgagttttggccaatgagacaaaagggaaagtctgctgggaacttctgggaaggggttttttctctctatctaccttcaccccctctttcttcctgctttcggtcgtgagaatgtgatgattagagctgtgacagccatcttgtgaccacaaggaaacatccttaccacactctgaggggtaaaacgaaggacagtaaaagctcgacactttgatgacattgttgatcctctgaacgaccctaggacttgaacaacattaaaatgttacatgttgtttatcaaaagacatcattagaataacaaaaaggcagcctctgtgctgggagatgatatttgaaatctctccttgaaaaggactcgtatacagaatactcaatgatagataactcagttgttaaaaattggggcaaaacttgaaaagaaactctagaaaagagaaaattaaaatggccaataagcaaagcacacaaaaaggtctgaacatcattattcatcagggaaatgcaaattaaaactacagtggggcccgggcctgttggctcatgcctgtaataccagcactttgggaggccgaagcaggcatatcacctgaggttgggagtttgagaccagcccgaccaacttggagaaaccctgtctctactaaaaatacaaaattagctgggcgtggtggcacatgcctgtaatcccagctacttgggaggctgaggcaggggaatcacttgaactcgggaggcagaggttgcagtgagctgagatctcaccattgcactccagcctgggtaacaagagcaaaactccatctaaaaaaaaaaaatacaatgggatacaatctcacacttaccagagtggctaaaattaaaaacactgaaaatacaaagtgtcggtgaggatgtggagaaactggaactctcatactctagtaatactaataataggagtgtaaatttggacagttgctttggaaaactgctaagcaatagctactaaaactaaacacagacttacctgatgaccaggtatttacccaagaaaaataaaaacatgtccacaagaagatgtgtatgtagatgatcatagcagctttattcagaacagcaaaacacaagaaacaccgccaacgcctgtcaacaaaagaacagaaaagtaagttgtgatatatccatacaatggatgtatatgttattttatgaatatataaaatggatatattggaaatactacatggataaaatagttactttttaaactacatagcagtgaaaaagaataaactactgacacgtagcaatatggatgaatcttaaaattatattgtgcaaaagaagctagacacaaaagagtacatacagcatgattcatttctatgaagtttaagaatgggcaaaaccattctatgctgttagaagttggttagtggttaccctttgcaatggcaggtggagcagtggggagcagtagctgggaaggaggtatggggatgccaaatgggatgtcaagaatgttctacatcttgatctagatcatatacttgcaaaaaattccttcagccattacagctcaagattcgtgtgctttatttatgcaatacagcaatctaaaacattaaaaaatgaataatctctatggtttaaggcacatttaatcgagtattctgttacttgtagcgaaaagcactctaacactcctcaacacaatttggcgacagaggatgtttgttgggtgagtgatggtaatacccgtggaatagcattcttacagggaacagggcacattcacgccattaacacctgtcactctcacttcagtcccaccagggagggtttgttagtttcctctaacagatgaggaaactgaggtccagagaatcgcactgacctgctcagagtcacacaacgagctttttttttttttttttttgagatggagtctcactgtgttgcccaggctggagtgcagtggcatgatcttggctcactgcagcctccgcctcccaggttcaagcaattctctgcctcagcctcccaagtagctgggattacaggtgcccgccaccatgcccagctattttttttttcttagtagagagaggttttgccatgttggccaggctggtcttgaactcctgacctcaagcaatccacctgcctcggtctcccaaagtgctgggattataggcatgagccactgtgcccagcctacacagtgagcttttgaccaatctagaatttgggcccaagattgtttaatcccaaacccagtgctctttccgctacacttctctcaccctgggcacatccaccaacaacatttgttgaactcctattctgtatacttcagggaaactttatctggtctctacttccactgagcttgtggtctaggagaagaacaagagttttatctaacaataataattgtatttttaagtgcttacgtttattaaatacttactatctcctagaccagcctttttcagtggagtccatgtattgcagagtatactccactgggttgcaagaaaaacaattagtaattctatctgtatatttgatctcatcttttaaaaattttcattttgtgtatatcatataagatgataatatattgattgataatatattatgtttttactttgtaaatgtacatattaaatatattgggggcaatgttcactgacaagaatgggacacctaaatctttaaagacccattggtcgcctgatcacatgatcccatctggccctcatgacactcctgaggaccagattttttttgttgtttttagagacagagtttgctatgtcactcaggctgggatgcagtggtacagtgatggctcactgcagccttgaactcctgggctcaaatgttcttcctgcctcagcctcccaaagctctgggattacgggcatgagccaccatgcgtgactgagaacccgatgtgttgccccatgttacatatgaagatacatctttaaggtaatgaatatcccaatcacccagatttaattcttaagcgttgtatacaggtatcaaaatatcacatataccccccaaatatggccaactattgcatgattaaaaaataaaagaaaaaagaaaaagaaaccatctttagcaatacccttttaaaaagtgctttttgtttgtttagctttctttgaacatttgacccaagtcttccctcactcagaaaaccactctgtaaaacatccctcaacatgatttcctcacagacaaacctgtctgataatttaatgctgctgccatttttttttctggagctctgaactttgatgcctatctggactagttttgctctagacttggggcacagataccattaggaattcctttgtctctcctgtgttgaaaccacagactgctatatctcagttcatcatagaaaatttacaaaataaaagccacagagattcattcccctgcctgtgtctaagctcttgtccaagcccctctcacattgactctgggcttggtcacgtgacttgctttggccaatggcataatggcaaacatgacacaagcagcagctggaaaattacttgtgcatatgagcctttgccctttcagctctggggaaccctgtgaccacaaccaggctggcagcaaacccaggctggtttgctgaagtataagagaccgatggctaaatcatctctgttaccccagctgtgccaagccaaccagcatatatatgtgagtgaggccattgacgaccagctgacggcagacacaggagagaagccagccaagaccacatggagcccagcccacgccactactgggctataggttcataagggaataaatggtggccgttttcaggcaatttgttacacaggaaaagctcatggttcctcttcttggtttagttcctctttttggtggagcacagcccctggtagcatggaagttttaaaacatgtgcaccaatcctttgacacttgtcccatcagcagatagggttcatgacaccttcccttgcttgggcctgtaccttagtaatgcagcaaaagtgacatggcataacttctgaagataagttagaaaaggccctacagtttccacctggttctcctgggacactcactccggggtaagccagccattgaggaagaggtatgagatcaccgtgctggaaaagctacatgtcaacacaccactcaacaatccagtcgagacagccttccagccatctgggccaaaggagccagactggtgagtgatgtcatcttgggccctccagaccagctcatccaccagctgaagaccactaagtgagctccatcaacaccacgtggaacagaatcatcacccagttgcaccctccctcagtttttaacccacaaaattaatccactaattttggtgatggtttgtcatgcaacaatagataaccagattctatgccatgatgggaagttctgcagtttcattgggaagtggcaggcattctgggacagaaaaaacttggggtcatttgtgcaatctactgcacagatttttaatctctggtttcttactctctgttccttccagagagcttcttgttcacattttactgctgcaatatctttatcactcaagggatattaattgtaggatttattttaagttttctcttgttccctggattcttttcttgaagaccttttaccccgccctcatggtttgctttgatctctgcacttcatgatagaaatttctaatgatccttggctgtctactcacattaccactctggctggaaactgggtggggagggtggactggtaggcttttgtgtagggtccatgcagggtggttgcatagggctggtgcaaaggggctggttggctttttctgtgatgcactctcctcccacccccaattaccgtatctttaggtctttgtcctggaagtggttctccagataattttctgcctggggttggacattctagaatgagacgggtgaagggggctgaagatctcaccttctctgggcctgatgtttctagttttggagtttctttgttgcctttttttcagagaataaacctccctttgcttgcccagaagtgagtggggttactacctggctgggcaggatgggggttggggacgtggaggtcccatgctccttgtacagattgctttcaatccccacttcaccagcagctcctccaagacctagtagcttcaatttttgaggcctttaggcaaattggcttgtttctctatgcagcaatccacccacacagcagtcacctaccccatccatttagctttgactttcttcctctcggttatgtcactggccacttcatccatttccctcctttgtagttcagggttacaaatgtctctcgatttcctcaaagacagagtttttgtttctgctccttattcttgttttggggaagttttttgtttgtttttttcttttttaagaagagaaaaggaatagaaatgtctttagtctactatcttaaagccaccatttcattagagttttaaatggaaaaagcaccctcttatattggacagaagtgtgtcagcaatgtgggttttgtgactcttactggagtaagagcctacattatacgccaaggtggcttcatgttctagttttacaaatgcatttgatacagttaataaaatagcaaattatgtattaaggagaatacagataagtcattgctggcttggcagagagtggagagcagccttgaccaaaaagcttagaggaggaaaagtggggtggaggcatgaggttgacctgtccctgctaagtgccactgttttcagctcacccctttccacctgcaggtccctgctcagatgccacctccttggaggatccccacccacctgtcactttctctctactaacttgttttatgtctgactgcctgccaatggatttgattgacttatttatctttaggtttgtcgaccccactagatcatgggctccatgaccagggggagctttgctttttcacctccatacactcggtgcctgtgagcacctggtacatcagtagatgctcaataaagagttgttgagtgaacaaatgaatgagccagtgattgcgtggatccatgttttctatgagaaggcagagctctgaggacagacagaggcccagtgtgcatgagaaagtcctgctggcccaggcagtggcctaagagctgcctaccatggcggtcactgttcttggggaaccacagatgtttcccctctaatccctccatggggaccaggggggcatgagaatgggagagaacacaaagtccctttattcaggggagtggattccatctcaagacaaattgttacctccaaggccaccagccgcccagccggcccatcaccatggcctccctcttaaggatgtgggcacaggcccggccagagctgaaattgccctggaaactagtctcccctttaattaacagggagggcgaccaggcctgctaacggggtggggtatggagtcggggtggggtcaagttcataaagtccccaaagaatcaaggcctccttgtttattttcccgaaaatgttccccattacccagaacagcataggggccaagcaggccgcaggcagggaaaaagctttaacctccccgctgctcagctcagcacatcactatttgacttgcattttaaaaataattacaaacttaatgaaaaaataacctaacccccaaacaggccagggactcatggccagcattggcaggagcaagcccctggcagctgtgaggatgagatgcaaagggtatagaggaaccactggaagacaggggacaccctttagatggacactccctctctctagcgccagctttggctccctattgccctttgtgtcatgcccaaatgtctcagcccatgtcttagagccagttttactcaggccctatgtggaagacactggaacccaaagaggaaaggaagttgctcaggttgtgcattgtgtgggacctgatgcaggtagtgaggctggttgggatgggttctcggggaaagagtggaggaaagtgagaatgtgtctctgttaccatctgagccctggctgggtatggccaacatgccaggtaagcagccttgggaagcaggcacgatgattatccatctttaatatcccaggacttgagtccaggtctgtcgggcttttagccaccacactaagtgctgtaaaaggagctggaggtagaaatgaagtaacaacaataataataataagcagctttcatggattgtagactatgtgccgtgcactgtgccaagctctttaccatctcttttaatctttgcaataactttatctggtaggtagtgttattgacccattttacaaacgacgcccagagcattggttcaaggttgtgcagctgggaaatggcctgtactcttctaccctgagaataatgctctacagtgagtcagggagtcttgtgaggtctcaagaacagggaccttgtctgtcttattcacttgtgtgtcctcagagcccagaagagagactggcatataatagatatttaatatctgtgttgtgaataagaatgaacaaatgcacctggacctagaagtaacttccgatgaaccatcccagttctcccttccccattccggattatctttacttacctggaagtgaacaagatattaaggggctccaaaagaactgagaaatagaacttggtttgaaagacagtagggagccacagcaggtccttcaggaatggagttccaagctaggggagtgatggtcttcctgtgtctttatggattccaggagctagtcaaggtcaatgagcctttagccagaaggtcaagttatccccagtggtaagtgttgggggaagaggagggcacttctcaggagttgagggtcccaaacttgtcatgctcattggttttgtggctgagagtggcaggttcaggctggccagccagcctcttcagcttgcccatggtaaatcccatgatcctgggtcaaggacgcccaaacatggtatgtccatagccagctgacagaattcgtatgtcattgaatctttcaacaatggattctttgaaacttacaactctggggcctttgaggtccatctcagattctgaggctgtagaaactgttcattttagaataatgataggtacaaaacatttactgagtacttactactccagacattgtttacaaatatcaacgcctttaatcctcacaaccaccccagaaggtagtaacaatgtgaccccccacttcacagatgtgaagacggaggcactgaaaggtgtaacttgcccagggtcactggccgcctggctctaaagcacacagcactgcctcacagacacttaaagtcgttgagacttacactcttcaaattttagaatcgtagaaagtcacaaggtcaggatcttcaagccacagagtcttaaaatcatagcactttagaacctgccatcattgactcatcaaattctgccgtcataaaatctgggcatgttataatcctggaattccagattcttggggacttttaagtcagagaagtttagatcctgggatattaggcttggattacagaccctagcccagtcctctcatatagcacagggaaactgaggcccacagaagtgacagaagtccaagagaggcagagcctggtggattcagtgtcatgtttggagggagaaatcggagtgaacaaagaaagcccctgggcaggcaggaatctgtttgtgattagcagtgggttttagtgttgccgaggaatgtacccaacgttaccgttacccccgcaggttgctgcctcctttcttccccctcagatgccctcctcagagcccatcctggccagactcaatatcctgtttctaccaccagcaaattgaattttcagaagttggcctcctaacgaagccagcttaatacgttggaggttttctttgcctgcattgctatttcttggtaggatgcctgctcttcaggagcccagagaggttttgcacactcaaatcacaacgccaggagggatgagggacaggaactatgggacaggtggctgggggcttagatagacccagaggtgggaatagaaatggcgtgtctcaagggggaggtgacaggtccacagggacctccgtactgctcaggccacacctgggaatttgggggccttcagtctttcagaaacattaaccaaatggggtttgtttagaggagggatggggagagatgggtgggaatcccatgctctgggagaccttgagcgtggactagatggaaagaagcatgaattctaaagttcagcctctcagctactgcccccttgaagacagacatgggtggagccctggggtatagacctaagattgaatggtggaaactccatgaagattttggttttatcaaaatcagtggttctcaggctgggcatggtggctcacacctgtaatcctgaggcgggcaggtcacttgagatcaggagttcaagaccagcctggccaacatggtgaaaccccatctctactaaaaatacaaaaattagctgggtgtggcatcagacacctgtagtcccagctgctcaggaggctgaggtaggagaattgcatgaacatgggaagcagaggttccagtgagccgagattgcaccactgcactccagcctgggcaatagagcaagagcctgtctaaaaaaaaaaaaaaaaaaaaagcaatggttctcaaagtacagtacagtccagaatctgtggggttcctgagaccattccagggcatccacatggtcaaaactatattcacaacaacactaagacattatttgttcttctaaccctcagtggggttgtccaaagttgatatgacatgtgatgccaccatcactctgatagcaatgaaaaaaattaatgcaaaaacattcatgatgaacaaaatactaaaactgtaaataaagagaagactaatactactgatttttcctttcatctcaggcttcagtgtgaatttttcaaaatattgcattaaaatgtcctaattactgatatttttggcacacaaattttaaacctgaggcaagtgcctcgtttaactcactctagtcctggctgtggatataatccacatcaacagaagcttgttggggtcctcaataatttttaaggatataaagtgtgctgagatgaaaacatttgagggtcactgataaaagggataatgttccatcagctcaaactatccaacaatggaggggattatattccaaggtactgagttcccatcacaaggtgtgtacaaatggggggattaaaggattgggtgtggggaagaggcctaatgtgcagcatctcttgcccaggtgcctcctgtggtcccacctacctggcatccaatagatcttctcattttcccacttgaaagcttgcaatggtaccccactgtgctctgagcaaaaacccacctcttctccatggcctaccaggctctatgtgtcctggccctgtctcccactcttttgcccctagcttgctctgctatccccaacctagcctctttctatttcttcagcatgccaaactctttcttacctagggattttgcacacgctgttccctctgcctggaacatcttcctcttcactcttctcatggctgttccttgtatcttctgagtttcaacttgactgttgcctccaggaaggcttccctgatcaccctatagtaagtaggatttctctgacatcatctctcaacctcttttttgcttccttcatggaagtcatcactgcttttttatatttacttgttggcatggatggttctcatctattctctccatgagaccatgagctcctccagggcaggaagcctgactgttcagacatggggcctcagcacctgacccagcacctggcatggaggaggcccttgagaagtgtttgttaagcaaataaacaaatcctttatgaattagtgaatgaatgagtaaatgaatgaaagattaaacagaaaaggcctctgactgctgatgctcaggcactcaccaggaaacccaaagtaacacaggttgttactttgatgaaacatcagtaaccatggctggatagtgtgtgatgaagtattaagcagtaagtgtttgcccactacccatcagcgctgatcaagttggaggagagggagactggcctggctgcagaaatcttggatgagttggggcttgaacacaagccttcagggctttgccaaggcaggttcccctgcctagtttctctgaagattcacattgtattcactgtgagggctcggctcaaataaccctgcctcctatggctcttccctgactcttcttgggtagggtcggaacacaccatccttgttctgggtgttattgtattaggataaccacccttgtctatcactgatttgaagacattagcttatagaaatgtcccgacagtatagatgttatcccagtttagagatgagaaaagtaaaggtcccagaagaacttacattccagtggaggagactcatcacgggcaaaaaaccaaacccacgtgttgtgagtgataagagttaaggtgaagaatgttgccgcggaagaggagtggggagacctctctgagggatcaaagagatgtgggtacaaattccatctaatagtgtcagctaaagttcagttaactgttaccactaacaatgagttagctgttgcttccaggatgtctgtttcacgaggacagggactatgttcacttttctgtccccagcacctagaacagtgaacaacacatagtaggtgttccatgtatggtgtgaggtgaataaaggcctgcctgcatcaggcgttgtatatgaattattttatttaatctccatggtcagagaggtaagggttatcatccccattttgtagataaggaaatgagggcacagtgaagttaaagtctaatgacttacccaagaacacccagatagtaaatggtggagcccgagttggattcgaatccagtccaatctgtctcgtatcttagccactctcctacacagccttattctgctcactcactgtgtgaccagggcatattgcctaacctctcatccactgaggatgtcattttctttagcttttgaaataatacccatgtcatagggttactgtgaaagtttggttcaggtagagctcttagattcctgtctggcacacagtgacacctcttttcaggtgacccattctcgtttgatattgtcagccattgtgaaataagagggtatagagcaaagctttccaaatggaaaaacctgctatgatttctagaaagtcttgggaaactttctagatcagttatggaggttgcagagcagaaggcctcaaggacgagatgcaaaaacagcacccatgcaagttgacttgtaaactgctttcttcatcctttaggaggaattgcccaagaggcagcatttatggggcatgcccagggtctccaggcactgtgctgagggctctgtatcccgtctgtcaatttttcccaactctattatacagatggcaccactgaggctcagagaggtgaagggacttgcccaaggcctcatagtgcatcagaaacagtcaggactcagctcaagaaaaggccccaaagcaagcactcccaaccacatgatctaagaccagggaacaaggggacaatgagagtgagggcaggaaaaacgctggaagatgtaccagagacttagcacttgactgatggcatctttccaggccagtgcccacccctcctctcctggccttctcttccacctcccaccctcctgggttcctgcaccattttctcactggagctcctgccatgcctgttatcttctgttggttcttgggaaaagactctgagatggagattggcgtgcagtgggtttattggggagagtgctcaggagtaagaccaatgcaggagtgaggaaaacaggcctgggaggagtgaacagctggcacaatggagttacaacagaaatctcagtgatcccacaggagctctggagcagagatggcccttcggagctgaaggatcgggtcaggcattttttatcatacaccaaccactctttggccacaggctgcacctggaacgaacgtgtccttgggcagggcaagtccctacagctgagggccattcccggctgggaaatatcagcagctggcagtcccatcagctgggaagggtgtctgatgagggaatccatgctagcccccagcctcctttccacctgtccactgttatctgacaatagcgatcatgccacactagctcacaccggcagagcactgtctacctctcaggctccctaccacgtcgtgtggtgtgtggattccctcattccatcctcatgacaaccatgagagggggacactttccacatgaggaaacggaggctcagtgagatgaagagcttgcccagagtcccaaggtgcaagaatgctgtagctggtattctcacccaagcagtgggacctatgggtcctatcttggtcccttatagaaactccttcctttaatccaactcggcactgagtcccctggagtcaaagctcctgccctccaaaagttcatcatccagtgggggaagtcaagacatatacactggaaagataagggctggtaagtgctgtgatgagaggtgacctgagggtgggtgacagggatgtcctgcccaggaaggcaggtgagacaaagtcagtgagttcagcctcagtggatgaggagagtgctgtgggaaggatcggggcagggtgggcttctaggcagtgggagcacaggtgcaaagacagagagggtgaaagagaggggccctccagaaatagggagtggtctcctgagatgacataggggtttgggggaaggaaaacaaggtcatcaaggtggaggggctccagcctcagggccctgcatgatacagtccctgcccttccgtgaatatttgctgaacgaatgaatggttggatgggtgaatgaatcgctgctgtggagggtggattggaggttacagagacgggcagggagaccagtggggggtccacagcaaatgtccaggtaagaggaaatgggcccaactttgcagggaccacaggggtgaagcgatgagagagagaaagagagagaggagcggaacgccgctgggtgtggtgacctagagcttctgtggcccatctctcagtctcaccctgttccacctccatgccctgcaccatgctgcatcccctgcctggcagctttttcctctccctctgcatctgcaagttgcactggctgcccaagctctgcttcctctaggaagtcttattgaccaatgcagctctcccttaccgtgcaaggtcacttcccatctccctcacagtttaaccctagcaaactccatttgcagaggccggtgttcaaaatgcaattctccaatttttgaatgccaggccaacagggaagcatttaatgcccttcagcaggggtatgatgggataagtgtgaatccatgtatcccgtacaggtaggacctctctgcccccatagtgcctgctcgttagccctctaagggaggcatctggtaaatctgggcttggagtttggaggatcggaaacaggaacgacctctctggggacagttcttaagttctaatggagcaactcttcacagagggacttgcaaagctcttaattaaagttaccatcagaacaaagactctctgaagcaagaatttggaccccaatggagtcctgaatccaggcaaccaagcttgcataagtgtgcaacacaaaggcaaatgagtccccaaggaagaagaggctccatcctcagcttgctgcccttgtctgagggaagcaccatgccctacagctgacatttactgagtttgcatccgttgactcttttggttgcagaaaactggctcagacaaaaaggggatttgctggactgaaaaggccaggctggagctatggtgcagcaggatctaagggcttaagtgatgtctttagggtggggtttctctccatttttttctgctcagcatccttcagaatccacttcattcccagagtctatgaaggtggggtgcacagagagagtctgttggaccagtgtggtcacacacacaccctgaaccaaggagcacaacacctgagtggctgaggctgcagggcacgtcccagattacactgaccaaagagtaggaaaatgttccccatcagaaattggtagaacagggaatggattctggggaagtaagcaatgaacattatccgtaagggcctactatatggtaagcagctattaatcgctttgccaatttatagttgaggaaacagcctcagagaggtgaagtcactctgacagccaggaagtagggaaaagcaagcttggaacgcagctctgtctggtaccagagctgagggtctggggagctccaccatcctgctttccaggcaacatctttacccatctctgttttggtccaaggcacaaagctggtgtcagatggctcttggataagcctgtgtgggaaggacagatagatgggggtgtgtatggatgaatggattggtgaatggatgaacagcggggtggatggatgggtaggtagaagggtggatggattgctggctgtgtggtttactggctaggtgggtgggtaaattggtatatggttaggtggaagggtggatgtatggataggtgggtggatgcttgggtgaataaatgaaatggcaactgaaaggacaggtggaaggatgtgtgggtaactagatgggagggtgaatagaataatgctgacataagcattaacaattatgtctagcctcttgcccctctcttcccaactgccttttccagtggaaaaattgaaaatcatggacccggggaacacattcccctgtggtctgttaatagaggcccagcaaggccagccgaggctgtcaactcaccccccactaggaccctgtcattagccacactcccccaaccctgcccttgggtggaagtatgatctggtgggcactgaggggctgggcccatccaggccccttattaagccttattaagcccacagacggggagcaaaaaggggagaagaactttctcccaaaggtcagctgttggaaaaagaaggtacagatgtctctggggtggtcgtctactctcaggccacaaggaatgtgaaagtttgcctggcccaatctgctctgctgtcttcttgcaggctgggaaactgaggcccatacaggagacaggagggacacacagaagtcgggacagagccagactcaaacctcaggccggctcacagaccatagcccagcctttccctgaaacagcctcagcatcaacaatggggagggaaaggaatgggcatgaatggggctcctgctatatgccaggcccttgagcaaagcattttctgttcatggagccactggtctcctctgtatccccatgagtaaaatggaagttatgcctgtcctgtcacggattgaacaagcatttgttaaacatctgttatactgtgggccaagcactggtctaggtgccaggaatatggcattaactagccaaacaaggtttctgctttcagagagcttactttctagacagtgatagagacagacaaataagtaggtagataaaatgtgatatgaagaaaattgaggagtggtatgagatgtacaaggatggaagggacgttctttggatgagatggttgggaagggcctctctgagaaggtgatcatggtcaaggtcattaattgtccaccaagtccattctcccctttgctagtatgtgggcaaagcccacaagtggctgtccaggcagggtcaacatttcccagccctatttgcatgcaggtgtggccatgtgactagctcttaccaatagaatgggagcagaagtgatgagtgccacatccaggcctagcttttgagaagtgagggagcttcccccatgttcttgttacttttcccctggctgaattcaaatgatggcaagaccccaagatagaggagccacaagattagaagagcctggattcctgcatcaccacatggaggagagccactcattgccctggcacatccattgcatgagtgagaaataaacttcaggtgagacccaaaagacatgtgatgaactggttaggacattgcaggcagaggaaatagcatgtgcaaaaggctcaaggcagaaccaagcttggcatgttggcacagaaaggataccaatgtggccagaataaatggcacaagaggaggaaatgaggtgaaccatgcaggcagtggcctcagtcaggagtctgtatttcaagtggccccagtggaggtggcgccatcagcagggaagaaataccatgtggttcatacttggaaaagatccctctggccactgtgcagagatgagttggaaggaggcaggaatggacacaccagagaggagctggtgcagtcatcctagcctggatgaggctggggacataagagtgagtgaacagagtgggtttggatatattttcaagggcttgctgatgggttgtttgtggaaggtgaaggaaaccaaataacccacaagccattaaacaaaatctaatgcagaagccaatatatattagtaaacactttaggggtctctgtctagcttctaatcttccttccctgagaacctcccacttatgcctatctgataactctacttatctgataaactggcccctcccctgccctagctcatggagctggagatcggtccctgactggggctcagccaatcagatcatccctggctgtcagaccccagtgtgtggctggatggggaataggctgggccctagcactctctccttgatagagatgatggggtagggggaaggtcagcagcccagaagctgaggaagaatgaactctccaaggaccacctacccatcccatagcaggcgaaacatagctgcaagtggactcaaccaccctcaaccacaattggagctgccaccagccaagtgtggaaagggttggtctttgcagagccctggactggaagaggagagtgggtctcccagggcagaaaatgggagtggccagctccaattctgtgcctcaggttgggagacatgatcctctgggttctttccataccctagacaaggatattccttgtctgagcctagacaagttattcccctgggaaggagggaggtgcttctgtttctccatctgtcaggtggctgagtataacagatttcatttccaaaaatggccacagccccctgctcctcatgaaccctgccactctccatcaagagggagagtttatttctcctcccctggagactggcaggactttgtgactgccttgatgaatagaacgcagcagaggtgactgtgtaacttccaagggtgggtaagaaaagacaatacagcttctctctggctctttgtcttgagacactcaccctgggaaccagacgaccacggtgtaaggaagcccaggccccctggaaaagccagaggtaaatgttctggccgacatttacccagctggggtcccagccaacagtcagcatcaaccaccagacccatgagggaatcagtccagcccctggccatcaagtcttccatctgaggccccagacaccgtggagcacagacaaatctacccactgtgcccttctggattcctgccccacacaatatgtgaatgcaatgaatgactgtttgatgccagtgtgttcaggggtgatgggtaacgcagcactagatacccagaacgctgactcaggcagactctgcctccatgacaccctccgtgctaagcatctgttccatttccccactgtcctgaaatttccagacactcctctttgacaagccaggcttggctatgagctggggcctctcagggatcttccaaagatcagccgtggaacaagccctgcggggagttcactccctggtcaagaacctttgctaactccccatttccccccatatcaaatctcagctcttctactaggcttcccaggcctgtcctaatctcctccatcctcatgtctccctgaaatgggccacaattcctccctctgcagtgtattaagagtgagaatgtggggttagatgaggtgaggggaatcgcaggctctgggagagctttgagagctaggcctgaagctttagaaggcagtcttccctcatttagcaaatattgagtcctagtgtgcactacgttctatttacagtgctgggaatacacagctgcacctgctagacataatccctgtcctaaacccatgaggatcatattctcttccacctcagggcctttgcacctgccattctcctaacctaaaatctatttcggaagatttgtgtacacctcatcctttatccttccagtctcaccttagaagggcctgcctggccaccctctctagtcatccccattgctaattccctttattattattattttttttttgagacagagtctcactctgtcactgaggctggagtgcaatggcacaatcttggctcactgcaacctctgcctcctgggttcaagtgattctcctgtctcagcctcccaagtagctgggattaccggcacatgctgccacacctagctaattttttgtattttagtagagacagggtttcaccgtgttcaaggctggtcttgaacttctgagctcaggcaatccacccacctctgcctcccaaggtgctaggattacaggtgtgagccaccatgcctggcctaattccctttactcttaattatatctccctgttcattttctccctaagtcttgaacaacagtatataatctgtgatggctgatttacttgatgtttgtctgacttcccctactagaagtgtcagctccctgaggcagggactgtgtctgtctcattcactgctgtgtgccagggcatggcacagggcctggcacccaggggtgctctatgactattaaatgtgtgcagtgtgatgctggctgcacagtgcctgcttgcagctgggaagctcgcagtaaggggtgatcctctctttctcttctgccctgtctgtggacatgccccataaacactcaacagactcccctctgtgccaggttccatgtgggcaccagcagcatgtaagggctcaaacacagtcgctggtactgaagcagctcccaaatactggggcaggagacagatatccagcctgtactggatatctggggacatagtgtagctggtagggagagacggcacaaaagtcagggcaccagaggtctgcagtgccaaattagagtggagtaaggactccatgctgagtaaggaaagaagatcaggcaggcactggggagtacattgaggatggaaaggagggcgatggaggccatctggaaggacgaaagcgagtggtagcaggagaggcatcttaggtatgaccccgggcatgacacgcaacctctctgaatctgtgtccctgttggtataacattctgtgaagcacacaggtcctggagccttcctgggttcaaatcccaccctctgattactcatgaccctcaataagttctttcaacttggtttcttcatctgtaaaatggagatgacaataatagcacctccccactattgtttcatcaggatcacatgagttaatgcattgaaaacacttagatcggtgccaggcacatggtaagtggtcagtcaacgtgagctagcactgaagcaggagtcacagttgcaaagcacagaccagtgcctgcacgcgcacacagcaggcactcatcagtgagacggaccttctatctgcctcttacgctgtaacacatatcaccacccaacatggtatttttttgcttatgtgattattgtcccttgcctccaccagaatgtgagctcaatgagggcaggggttctgtctcttttgttcccttgcattatccccagagcccagggcagtacttgacacatagtaggtgctcagtaagtagttgctgaatgaattcatttctaatttttagttttgtgcttggtgcacagcaaatgctcaacaaatgctggtcctcttcacccctaccagcctctccatcccgtttctacctgctccaggaagccctcttgggcctcgcagcatccaccaaccgtccttcatcccaggctaagttccccacagacccccttggcccacctcccatctgctttatcatgcctgtggagccaaggttcaccttgttccccggcactcccgccagcgtgagtaagcatcagccaggacctggagagtagaacccacccagagaagagcccctgcttctctgcccaccccaggccagaagtgctcttgcccctggactggtttgtccagggaggttttccaagtcactgagagccccatgatcagatgtcaccagatcctcccaccccggctgcaggggctgcagtaccaccagggccagagccatccccatgcgtgatttcaacatctgtaatactttcccctctccttgtggaattccccctccaaattcctcctgcttcattattagtatatataaaaaataaaaaaattaagctgtcttaatcattttccatattagctgacagccggttcccatatgcctgggagtgagaccacacctcctgttccccccccctccccgccctctctgctgttccaaaatgactagccccaaacaaggcccagttactgaaaaccctctatcttacagactccgcagccctgactccttggagtcctgtctggctggtgtggcccaagccaaaagcaaagcaggaagattctcttatgtccccaaaaagtgcagacctcagggctgggctgatcaaggtgcaaatctcagtgtcatcacctacaaactggaactccacaaactgctttgtcctgtccaagaaagggcacaaattctgaagcagacggatctgagttccatctctggaactcagctctgtcaccttgggcgagccagttcaccactctgagcctgagtttcgtcatctgtaaaacggcagaaacaacagcagttacctctcagtgtcacagtgaaaatcaaggagactttgataacagcagtgaacatccactgatcccactgtgtgccaggcactgagccaagccctccctgcctccccctcattgcatctgcacaacaacctgctttgcagacagaaacaaagggaccgagatattaaaaatttctccaggacaaagaacagggaggtggaggagcaccctgacccaggcccggcattttcagttccactcgagagcctgaccccctggagatactccacaagtcctcacccttttcccccagtttcaccttggtctttcctcctctcatggtcttgagcatgggcatcagggattggcagcactgttgtgtcctgtccccactgcccaaccccagtgccagggctgtgagcatcaggagggtcggtaggagcccgtggcccatgcatggcagactcaggtggcccagcaccttgcggctgctcctaaaagcacagacacctgtattgaagagagggaagttctgggttgaacttgaactgattgagaattcccaagccagaggagatagacaactatgccagacctcaaacttgaagattgtttttgtttttatttaactgaaccaaactgatttttttcttccccccgaattacgagtgaatcagttcataatagaagcccccattatatctcctagatttttaaccaaaatatccaaaaagaattgggctaacatagccacaccatcttggaatatgtatatttatagtgacatgtcataaagacttctagtattttgtctctactcttgatccaaactccagtggttccggtttctctatattaagtattcacgtgctttgcatgtgtcacttttcatccttcagcccttagagggaagtatcattcatcttcaacttacagatgaggaaactgagactcaacgtagttaaatgatctgtaagacaaggttctgaatttgaacataggtctcagctgcagagccatgttattgctaacacagcctctgtatggttctccagaaggcccctgatccactaagaaacaaacctgtcccccaatgccagctgaccctatccatgaaccctcctccctccagccagacaggcctctgcccggagaggcagcatcatctccagctgcctgtactctcatcccagttcagccattcgccaagcatgacaactcggacaagacctttccctcctcagcctgtttcctcctgtgctgaggagaaataaaatcctccatctcccacgctgttctgtgaaatgaagcaatcatgtacctaaagtgcgagcacatagctgggcatggtggctcacacctgtaatcccagcactttgggaggctgaggcaggcgtatcacttgagcttaggagttcaagaccagcctggtcaacatggcaaaaatccaccacttgagactaggatttcaagaccagccgggccaacatggcaaaaacccatacaaaattagctgggcgtggtggcacacacctgtaatcccagctactcaggaggctgaggcacgagaatcacttcaacccacgaggcagagcttgcagtgagctgagatggcaccactgcattctggcctgggtgacagagcaagactgtctcaaaaaccaaaaacaacaataacaaaaaaaagggctagcacttattttacttctaaactctccagcctcaacccaacgtaagtgaggtgcatataataggtgctcaagaattactcattgatgataaaagcaagcctggaacaacaaaaataagagactgggcagaaatattacaaaacatcagaagtagatccctctggggtggaattatgggtgattttattgtcttcttggtgattttttttttctattttccaaactctcagcttggaagtatgttatactgtgttttctaattgtatgacactatgaactatacaatgcactgtacacctaatagcagtttttgagaggaaagaacaaaactacttcattggattgtaagacttgttctgattttggtaaagttaaactctgcagggcaggaagagtagagaggtgttttagaatcaaggaaatacatttgtaatcaagcaatcaaagtggtggtcttggggggaggaggctaataaaattattattgttaatgttattattatttttgagatggagtctccctctgttgcccaggctggggtgcagtggcatgatcttggctcactgtaacctccacctcccgaattcaagcaattatcctgcctcagcctcccaagtagctgggactacaggcgcacgccaccatgcctggctaattttttgtattttaggagagactgggtttcaccgtgttgctcaagctggtctcaaactcctgagctcaggcaatccacccgcctcggcctccgaaagtgctgggattacaggcatgagccactgaacctggccatagcattactttttaaaggaggaagaggatacaggcaacttttcattgcttccagaacctggaacatcagcttaaccttgccggcacacccagctcacctgggatatttgaaaataaacacagatggccaggccctgtcctggtctgaatggccagcatctctaggctggggcctgggagtctgtgttttaagtggacacagcagatcctgggcactgtatagtaaataaatctcctcatccactttctgtctcatcttacagatgggaaatcagaagtccaaccaggggaggtgtttagcactctcctgcctgaatggtgagggtggccaatctcttccttcaccccaagggcctttctcagtccctgtcaccatcttacctctcccagtcctagccccttccccagccttgctctgccagcctggagctgtttcttccttttctccctaagggagtgttccctgttcttaattagggagactctgggtatttttgtctctttgagtactgcgttctgttgccagcaaataactttaaatagaaaaaatatgcccaaaattaaactagaaaacagaaataaataggaagggggtgggctgagtgtcagcctgcccttggtggagagggtgggctctgggcctcctttcctgcatctctgccatggagaccatcacagtacccaccttctggggtgctgtgcacatcagacaagaagaggcacacagtacactttgcacagggtgtctaagtgtccattaatatccaaagttactgggcacactcgttgcttggattttgagataattatgtagagaaaatgtcaaggggctcaaagtcccccagttgacatttccctaccaagagctacttttataacatgctgccggatgtcattttcttaataggtacaattttaagagcatctctccaccttcttccctaccctagtccaactgttcacagctgaaagagtgaccttccaaaagcctaactcagatcatatgattctttgcctctgaaatttttcaaagctctccattgtctacgaaatgccggcctcagagcctttcaggataggggccatgaagggtctcaaatttcaaatttcatcttcctctaccatcctcctgtcaccctccagccacacagacctgccccttggtccccaaatggatgcccacttcctttttccctaattgaaagccagggcagagttaggttaatcacatgccttagctccagccacacttttggcaccagagtgagacccctcccttattttatgtgtccctttcatgcctcatccctactctcatcccacctctcatccctccctcatgtggatacccccctaacgtgtttggcgtgtgtctttaaacatgcacgtgcccttggaaaatgtgcaatgttgttgtctgtgtgtatgattttaatttacataaatgctattcatattatggcttcttaccttttttccttgacactgtcttgagatctagcctgcatatgtgtggaatcatcacttccaactgcagaagagtcagccacagggggtgtcctctgtgcttccctgcccatcgttctggtgctggtggcctaggctacctctgactccccacaacaaacctctgactgcttcttatgtaagagaacacaacgacagctcctgctttttgcataacgagccgttgtttagtaacaaggggcagatgcctcactcaagtggatttagacacagagacaaagaaagtgtagatctaggtgttcactaactcctcaggcagctgtctttctccatcttatcaattccaagatcccagcctcccaccttggcaactgcaggggaaaagaagctcccgaaacagtcccaggtgactttctggaccatagcctttgtgctgtttctttgacggtgggatctggttttgtcctggcttcagccttcccagatccatgtgtttcagaggaagtgaactccagtctcggggtgttatggactgaattcgaaattgtgttgaaaccctaaagcccaatgtggctatattagaagacatggtctgaagggaggtaattcaagttaaaggaggtcacgagggtggtatccagtaggactggtgtccttataagaggaagagacatcagagctctctcttcacatagacacacagagcagatgccacatgaggacacagtgaggaggtggccatctacaggccagaaaggcctcaccagaaaccaaacctgatgacaccttgatcttgaacttccagcctccagaaccaggaggaaataaatttctgttgctgaagacacccagtctgcagtattttgttatggtagcccaagcagactaatacagggaatgaactgtgattggtctaaggcaatatttctccatttttttttcattattacccctcattattgacctcctgaagagttgttttaagaatttttttctcctaagagtgcctcccacaaaatatatatatactacagacatatctatttatgtagtgtggtttcttggagggtcacaaacggttgtcatatctaagattttgtcataccttaacctaagctaatttttacagccttaggagcaatattgccccattgagaatgcactgcctaaggcaatgtacttggtctgtgattggttagaacatgggcatgtgaggctaatgtagaccatagatgtgagagccacagaggaagaaattgtcccttttcacctttggtctttattatggatggacataatgcctggatctgcggcagctattttgtgactatgaggacaggctgatatgctttaaatggccaactagtagataaaacctaggccattgttcatatatatatatatatttgagatggaatttcactcttgtcacccaggctgaagttcagtggctcgatctcagttcactgcaacctctgcctggttcaagctattcccctgccagagccttcagagtatctgggattacaggcacccaccaccactcccagctaatttttgtatttttagtagagacgacgtttcaccatgttggtcaggttggtctcaaactcctgacctcaggtgatccacccacctcggcctcccaaagtgctgggattacatgtgtgagccaccacacccggcccactgatcatatttttgagcaataaaagtaaccagccctgaaactgccctaccacaaactcctccttatgtgaaatgatgcattttcacatttcagcctgttcagctgtgtagtttttgtaattgcagctgaagacattctaacagatcctgttctttttcccgtaagttgtaccaaatgttctgaggcagactggcagtgatgggcctggttagtccatgagttcatccccaaaccaatcttgtggccagacttgaatcctgtgcccacccacctttgtagctcagggatgggaaggggtcaaccccacctggactgagaactgggggctgttcctccgagggagatgagggagatacttcccaaagggattgtgaatgctgagagggcagaaatgacagctgggtttcacattcacaccatcccttctacatgaaataccccatctccagcccaatatactccctctagtgcagctcagcatctccctcttctgaaaggtctccccaagaccatgttgaaattatctcttctcttccaggtgatgctcactggggcatttgtagtctacctctgcccttaagaggccagtcttcatggcatgcaatcattcatgcatccatctaccctccaatcttaattagcaccttctgtagccatccctaggccttggggtgctaagcaagaaaaaggcataatttccatcctcaaggatctcacagtccaggggaggaagcaaaactcataggcattcattcgacacacatttattctctgtatagatatgagtaaaatattgcatatcctcaaggaaagggggaactccccagctaatgggacagacagatgaagaacaagtaagtacagtgtataatgaggtgacagaagccaccactcattgctctgactaggaggaaacaacaagatgccttagactcttttggccaaggaaagacacactagctgtgtgaatgccaggtgagctggcatcatttgtctgggatagggtgcagtggaggctgttgaggcctgacagcttcccccttcaccttactccattgtttgccaggctcatgcctgggagaaccatatgcataagaagacctggatcttataggaagaagaagtggaaaagccaatacctgacctccaggaatcagaatttgtgttgcaggttgggttctatgcaggcagacacgaagacagagtttaggtgcaaggtgtttattaggaatcaatatctggaaaagaaaggggcaggaatcagggttgaggaggaggagatacttaactgcaatgtgacccagtaaagcgttggtcaacatggtgaggaagttgggagcaagaattatccctcgatagacaccccgttctacatgatgtaattattatgaattacatgcctgtatcaaaacatctcatgtaccccataaatatatatatacctactatgtacccacaaaaattaaaattaaaaagagttacccctcagagaatcccaaaagatatcaaaatatccagacttttgtctcagccccttcattttgatagttcactattcaccaaatacaggttgccccaggaagggcatggcctgggatgaagtggccctctcaagctgaggctaaccttgaaggggctgaagctgaaggctctctgctgaccatgcttcccccgccttcagctgtcaagtccttcagggtcagctcagttctgagtgccactttacttggggtcacttctttgattccaagcagtttaacataatggcaaccacagttagggagacctgtcctggtggatcagggtggcccaagctaaggtctggaggaaagacgaccctcaagaaaagatgtctcctctgtccctccaccccattcatactaagggccatgggttcatggagagggtttcagatgggcacattatagggctgaggctaaaagtctctttgaaccaactcacacttgtacagaagtgatgctgtgaggactaatgaaaacaagtagcatctactgcatgcttaacatacaccaggcactattccaaattttttacccacattagtcatttaattctcacattaccctatcagaggaacaatgatgagcatgggtatgtagaccagaaggagctaaaaccctagaacacaagcagaggacaccagtgagcccaggaaaggccctgggcccctggaagcagtctcctcatccgcctgcatgggccagggttcaacagaggcaccatgtggctgcaagaggcagaaatggctgcagactgagctctactagttccttccacttgatgtttgaataaagtccctggaaaacttggggagatgggatgagtatctcagctgggaacacaccaagacttcttaataaggcatggagaggctcaagcaattgattggaaagaaaaaaaaaaaacaaaactaactcaagttggtagattttacctgccatgagatgtttgtgaatagcagagcacagggtagagaggtcactgccaaagagcaactcccagtcacccttgacatgtggcatcccctctcatgcctccacgtctgcataagcttggtaatcttgtgccctctgacaccattctcccacctgtcaccccactccattctgcccatcaggataatgctgccacatcctccaggaagccttctctggctgtccttctccatgacgctaggctccccttccatcttcccacaacttcatgtacctccctctatcattttatttatcaatcattctagattttatgtgtttatgactgactttcctcctagattatgaggcagtatgattatattatttacctttcccactgtcatgcattcccatttatctcactcggcgattgtcacaacaatgctgcaaactaactaccactaagctcagtggcttaaaacaataacttcttctcactcatgggtctgtaggtcagctgggattctggtggtctagactgggctgggctccaggcatgcatgcggatctgctccacgcgtctctcatcctccttgacccacagaagacagctggaagcaggcaggacctcataggctttagctcagagctggtgtgctgtcacttctgcccatgttccatcagccagagcaagtcacatggccaagctcaacatcaattagatgtggagaaaattgatgagtcatgtggcaaagggcatggatataggaaaaggtgaaaattaggaatagtatgatttactgtgacacagatgctttctggtgaacaccaacctctccaaactcatttcaagacccttcctcatcagcccagtgctcaaggtcaattcctgcaaccttcagccctttgtagcctttcagtcttttgaacacactgtactttttgtctgacatacacctttcccatccctttcagatctcagctgagatgtcatctcctcaaagatttgcatggctgtaggctttgccaccaggagatagtgacccaacaaacaagcttgtatgggtgagtccctgaatccaaacccaaccctgcctggccttgccactcactgctgtgaggccctaagaaaatcttatcttttttctactgctgttttcttatctgccaaaagtaaataaaaacatcttcccatatcagttagaaatgcttgcagctgcaagtagcagaacccctaatagtagctaaaacaataatatctcacaaactagatgcctggaagcaagaagctccagggctggtttattggctcagtgatgtaaggactaagtgctcactcataccctctcatttctcctccttccctttccccattctactaggttggtgcaaaagtaattgtggtttttgccattactttcaatggcaaattgtggtgcaaaagtagttgtggtttttgccattactttcaatggaaaaaacagcaattacttttgcaccaacagcaaaaacagcaattacttttgcaccaaccttaatatttccacagtgtcttccctaaagtctcacagaaggttccctttacattttactgggcagacatggatcatatggccactctagcaggaaagtgaagtgggaatgccaatatcagggttttgttgttgttgttgttcagcctcctttgggggaagcagcaaacgagaagggggtaagaattggctgctgtgtaatcaactcacaatatctactcctgatctaactttctacctcacagaatttttgtgaaaatttggattgccagtagcactctgaaggccacaagcttataaaataataatctacttttattattattcatgacttattaagaaaaaatcaatattggaagagaataatacttcgcatttgttcaacaatgaactttccgaaggtgaaaggaaaagcaattactgtctgagcccagcctgagtcccaagtccatgccaagcgcaagcctgcaagaccatttcctcctccagggacttgcttcgattgtgctaaaacagcttctgccaagccaaccaggattgcatgctgccaaatccagtactcattttcctgatcttattttatttgaattccctgagcattcaatccagttggcagcaccctccttgatacatgatcctgtctgggcttctgtatgctcacagccctggttgttcctcagtctcctctgctggcttctccccatctacctggtttctagatgccagctgactcaggactcacatgtgagctcctctcctccttcccaccccctatgctctttctgtctcaggtttctcaaaccttagcatgcatcaccgtcacagggagggcttgttaacacatagattgctgggtctcactcccacagtgtctgatttcatcgctctagggtgaaacctgaacacttgcatttctaacaatttctaggtgatggtgatgatgctggtcctgggaccaccccttgagaacctctcactgctctatctcaaccagtgttgagagccttgtttctcagccttggctgcaaattggaatcacccggggtgctttaaaatatggacaccaggatctcatcccccagagattctgattttaatggtctgcattatatcctgggtacctagagttaaaaacctcccccaggtgacttcaacatgcaggtaaagttgaaagcccctaatttagatactacttaactgctagtaacacctacatttatttccctctcccagacttgtcctctgagttttagcccagtatgcccaattattcactcgatatctccacttacgtgactcacaagcatctgagagttaacacacccaaagtggaagtctgaatcttcacttccaaattgctacttctctatcttccccatctcagcaaacagcaactccatccatgtgctgtagtttattggggtaaaaaccttggagttatctttggctcctctctcccctccatgacccatatataatcctttgacatagtctatcggttccacctacaaaacatatccctaaattctcctctctgcctgaactgctaacacctacatcagaatatcatcaactctttcctgggtggtctctgcagcatcctcacctccctacttctattctttactccctcgccaatgcatcctccaaacagcagccagaatggtctcttaaaatcataaaccagatcatgatacaccccgatttaaagtcttgcaaaacttcctgtcaccttgggcataaaatctcagctcttgctcatggccagtgagatcctgtcctcttctcaaccttgtctattccgctctctccctggcttagatactccaaacacactggccttccttctgtcccttaaatacattcagttatttcttgcatttactatttcattaacctggatttctgttccctttggactctgcttggccagctacctctcatctttcaggtctgcttaagtgtcactgccttaaagtgtctccctgacccgcctgttatgttctatcataagactctatattcttcttagcgcctatcagagttggtgatcatttgatttgtaaatatattggtttattatttgtctctctcactagactgtgtgctttgtgagggcaggaaccatgcctgttttggtcacggttgacacctcagtgcccagaagagtgaatgagacatagtgggtattcaaaacatacttagggagggagagaaaagaggaagaaaaaggagggaggagaaaggaaggtctagtaatactcagagcccaggaattacacaccagataccccttgcttctacccaagaggtggttcagattagagattagatttcaaggctccagcttgctagctcataactgcttctactcaagacggtctattcatgtagcaaagtcaaaatgtgaacatgcttttaagttccttgacgacaggaattgtggcttgtttactcttctacctggcatttgcacagagcctgggcctgaatgaaagttcagtaaatggttcatgaatgatttgaatggcatttgcctgaaggaaatctaagaaagtcttgccttggtttccccattaaatggggcaagcaattcttatctccccttccagagagctgctgccaacacagggaatccatcctggaagaaaagattggtggccacctgcaccatcaggtggagggcatctctcagctgcccttgccacatctgcagccctaagcttccaggtgaccccagtggaccagtctgcccagagcatatcattagttaggggcactctgcaggaggatgcctgcctttgctagtgcatagctaatgtcccagggggcttcctctaattaaaacccaaactgcaattatagttgtgccaaagcatgtgcacatggcgccacttaaaagggacagattgacaaggcgttaacaactccagaggcagcattgtcccagcaccaggtgctaccaatcatcaaaattagaaccaaatgagtcactggggctcaagatacagtatccagtgcagactaatgggtgattccaagaaacttatgaggattatttaaaacacactaactatgctccttctacagggcctttgcacttactagtccctgtacttcttcttgcctaactctatttgatctctctcaattatcacctcttctgagacacctgctttgatcacatgaatctctaccctgctttatttttcttcttagtgtttattatcatctgatattatatatttgttttgcgattgatagcccaaaatatgttttaatattgtataaatgtaaaacatatataaatacacaaaattttataattttctgcaatacatatgtatcaagaagatacagcatacacactaaggagggtgtcttcttggggttgggggtggtgaggcaggggaatagaaagactgattcagaaagaagagaggaacaataaaagaacaaatgagaatatttatatatcctgatgacaatagtgggccattatttgaagagtatgataaacttgaattttccttcctatcacttggtaaacttgaattattcctccctgaagttctgtactctgggaaaattttcttttttttttttttttggagacagagtcttgctctgtcaccaggctggagtacagtggcacgatctcggctcactgcaacctctgcctcctgggttcaagtgattctcatgcctcagcctcccaagtagctgggattataggcacatgccaccacacccagctaatttttgtatttttagtagagacagggtttcaccatgttggccaggatggtctcgatctcctgacctcatgatctgcccaccttggcctcccagagtgctgggattacaggtgtgagccaccatgcctggccactctgggataattttattttggtttttagaaataactttattgaatattttagtaccagtaatcttgcgataaatttcagccctggtttggttgttgttgttgttgtttttggtctaaagccatcttgattttgcctttatttttgaagagtatttttactagatatagaattctaagttgtcaattatgtatattttttcagcactttataaatgttatttcattgtcttctggctttcatcatttctgttgaaaagtctaccatcagtcttattgttgctcttctgtaggtaatgtcatttacctctgactacttttaagatttttctctttatttttgtttttcagcagtcttactatgatgttcctatgtataattttcttagtatttaccctgcttgggattgtcagagcttcttgagtctgtgggttgatatcttttatcagttttgaaaaaattcttagctcttatttctgcaaatattgttaattttgtattcttatcctcaccttctaggactccaaataaatgtatattttttttactaggtcccacatatctatgacacattcgtgtattttctattatttttctatgtatactttagtttggacacttttcatttttttaagtgtgctaatcctatcttccactgtatcaaatctctgttaatcccatctgatgaatttttgatttcagatattatattttctcattctagaggtatcattttttcttttttatagacgctaattttctgatgaaattctccatcttttcaaatattttgtgcatatttttctgttttttaacatattaatcttagcatgtcaaagtcattatcatatacctgtttctattgtctattttattctgtttgttttcagatatgtcctagctttggcataactaataatgttaatagaatgccacttattatacataatgtagagactccagatgatatattcttctagagaagatttaccctctgctaggcacagagtggggcttatcatcataaaccagtcagggattgtactgagtcaagactgtaaggtaaccccaggaaggtcagtttccctgtgcttcagtcagtcatacactgaacacctcttctcagaggctttatgccaaggtttatagcctcctgcaccaggtatcccagaatccagcaagtgtcttgagggattaatgagccctcaagtctgccaaaggctctgctggtttcttccacactagtccagtgctgcataaaacttggattctcagcattctgcttttgcctagaattggaaaatggtctggggtaaagaagctatataattcagcttactcccctgctgttcattcctttccagaattttagcaagtagtatatttttttccaatcctatgatatctgacaatgctactatatttctctagtcaatttactcttccatttcctgggcaaccatttcactttctcttatttcttcacatctttgacaccttctttctctcctcacttctaactgacggcttacaaatgaaagcaagtggaatgacaataactttttataaaaacttctacactagtccatcaacacgtctctctaatacttctccctccctctctttctctctctccctttctctctctccatgtgtctgctggatcccatcattctcatctaatcaaggactttgctcctataatcatccctccatgaatcattttcctctctctgctaaattattcccataagtggacaaatataccattagtctcccatcttctaaaaagtatataccctcccttgtctcaatatctctgtgcagctacccccacattttgtttcttcccatttgaagcaaaactcctcaaaaattgtatatattcactatcttcattttctttccttctatgccaaacaggttttcctccttcaaagctactctcatcagggtcaccaaatacctctgcattgccaaatccagaggtcagttcacagacctcgccttacctgattgctcagaagcatttgacactgttctctttgctggttcttcctcatgttctcgacatctgagtgttggagacccccaaaatcagtcctaggactctttcttttccttctatatattccttttacgtgctttccttattctctttgtatataatttaatacctctactgggtaatttacaaagaaaacaaacttatttctcacagttctagaagctggaaagtccaagatcaaggcagcagcatgttcagacgtgtggtgagggctgccctctgcttcctagatggtgccttgatgctgttgtcctccagaggagaggaaatctgtaaattcacatagtggaagatacggaattatgaaaaaggaacaaactccctccatcaagctcttttatcagtaccttgatccattctgccctcatggcttaaacacctttcaaaaggccccacttcaacactgttgcattggcaattaagtttccaacacacacattttggggaacacattcagaccatagcaacccttttgttcagtctcatgattttaaatatcatttatattttatgactctcaaatgattctagccagaaattatctcatgagctctagactctctctacatacccacattaacagcaacgaaagcacatttaatcaatttaacccaaggaagtaatacgatgagctcaggtaatacagactgagacttcatccaagatcacaaggatggtatgtgctagactccaaagagatgcccaagattttgtaaatacccttcccttccacaagaatagagttgttatttggtgtgatttctcagggagttggggagatctcttatcaaactcccaaattgctctccaatctgctcaagttttctgaaatgttgttgtttctgggtcatagcatatgcacatacttactttggttaagttcagccaaattatttctccagaatggctgttccagtctacattctttccagccatgcctgtgggctcttatctccacatctttgccaggtattactagccttttagtttttgcctggttaataaatgtaaagtgctaattctctgatgttttatttatcatattactaattaatttgagcatctctcacttacttgttggcttgtttctttttccataaattggtatccatttctcttgccagttttttattatggagtatatatatattgccaatttaaaggacttctttgaatattctagtgatttgtcccctgtcaattttagaaattgcaaacatctcctaatttgtcattagtctattatctttgtctttatgtctgtcatttaagagaaatcattttcctgtaaatgttttaaaactttttattgtaaaataaaacacattaaaaatctcacacggcaaatgtttaacttagtaaattattataaactgaaccctttaaagtattactcaagtcaagaatataactttgccggccattcagaagcccctccgtatgttctatcccaattatagctccctctcccctccaaaagcaatattaccctgactttcatatcaatcactttcttgcttcttttatcatccaagtgtgcacccccagacactatggtttagtcttgccatttaaaaaaatgtttatatgtattttgagtctcttttaatctacaggctccctttccatctcttctctttctttaatattcatctgttgaagaacccaggccatttgacctgtacagagtcccatagtttggaatttgctgattgcaagtcttggtgaagttcaagattcctctgtttaacgtctttactgtaaatggacagctggtccagaggcttcatcaggctcagacgctgtgttattttatcatgtggcacattcctatctgggtgcttctctttgagaaggcagtgacacttaaagattagatctattgattcattgcggattggaaaaaggggatgttctaattccattttttttttcattttttttaactggaataattttataaagagacacttttctcactcgccattggttattgttacgaactgaattgtatccctccccaaattcattcattcgttgaaacctagcccccaatgtcactgtacttggatatagggccgctagggaggtagttgaggttaaatgaggtcagaagggtagggtactaatccaataagactggtacccttagcaaacaaagagactccagtggtctgtgtccttctctccatacctgcaaagaggaaaggccatatgaagacacaatgagaagtcagccctctgtaagccaggaaggaagactcaccagaaaccacattttgtggcaccttgattttggacttcccagcctccagaactgtgagaaaataaatttctgttgtttaagccacccattcggcggtattttattttggcagccctagcaaactaacaccattacccaagtggtataattaatacataaaagagaagataactgcttgattctctttatttaccaggtttcgagataatgaatttgttcctgttatcctccaaaggctaccatttaaattcttttgttattattaaatcatggatttaagtatagtttgtggttttcaatccattgcatttttattctaattgacaatcaagttgttccatctttgaacagtaggaagctctttggcttggctcctgaggccttttgacttatctcccttagtccttgaagcttctttgtatcttgaatgacaaaatattccaggcttgtcctaccttcatatcctgctttaaacctagaatcagccatttcttcaaggagtcctgggtccttctaatgagaaattttatttcaagactataatatgaatgctagagatgttcactgctcctgggctgctcattaagtctaggcttcttgagtgggcaaagctaatatacatatatgtatgtgtgtgtgtgtgtatatatatatatataactcatgaattcatactggttcaatgagttcagttctaacttagaactcagattgttcacttaacttcttttacactatatttgaatcttttttcttacattctgagaattctggttcttaatatcacagggagtgatataattaggatgtcaatagtctttaattatttaatttatcccatgttgtacacacaacaatactaccaatcctaattactgacaacagtttaaaaagttttgcatatgctattccattccctccccatttttatatttacataatcaaataataaagcctttaatatatagtctctttctggtcttagttccgcaagtgggtatatataaaggctcaaaatcaatctttatattgacatctctctacttatttgtgttgtctgatgctcatattgtaggagattcctcaagaaaggctcatggaaaaaacatttcctgagttcttgtaggttgatgacagtttaaaccctttgtattgaatgccaattttgatggatataaaatccttgagggccaggcatggtggctcacgcctgtaatcccaacactttgggaggctgaggtgggcagatcacctgaggtcaggacttcgagaccagcctggccaacacggtgaagccctgtctctactaaaaattcaaaaattagctgggcatggtggtgggtgcctgcaatcccagctactcaggaggttgaggcaggagaattgcttgaacctgggaggcagaggttacagtgagcccagatcacaccactgcactccagcctgggcgacatagtgagactccatctaaaaaaaaaaaatccttgagttcatattttctttccttaaggtatcttcaatattttactccttttcatctaccataaagtgtttctgtcaaaaaattatgatactctaatggtctttctttatgttatatactctttttgcctagatgcccgattttaaaatttgtctttaaaagttgttttggcccggtgcagtggctcacgcctgtaatcccagcactttgagaggccaaggtgggcggatcacgagatcagagtttgagacaagcctgaccaacatggtgaaactccatctctactaaaaatacaaaaattagccaggcatggaggggcgcacctgtaatcccagctactcaggaggctgaggcaggagaatcgcttgaacccgggaggcggaggttgcagtgagccgagatcatgccactgcactccagcctaggtgacaaagaaagactcagtctcaaaaaaaaaaaaagaaaaaaaaaaagactagttgttttactggaatatatcttggtcaatagaggtcaatattctcagatagttagtgtgctttttcaatatgtattttcaatatgtaaatttaaatatttcttgtttcaagaaaggtgattttaattacttattgtggtatttattttgttcgtttgcttcaatttttctctcttaaggactcctattatctctatgatggatcttctttgcctaccaatatttgtcttttctcgtgaatctttcttatatgtttcatttccttttgtttaaaaactttcaactttctttttcttaaggtactatttgttctgcatatgatgaacagccactctcttccttctagtttagactttatttcttaaattacatttcttttatttctaaatataattgctaagtttttcctaatgtctttttagttcactttaaaattgtacattgcagttctaatctgccttacaaacatgtctttctgaagtgctttcataatctgtaaggatgttattccccatatcttcttcttcttattttgtataggatttgacctggatacttttgaggctcatttttatgttaaattcatttacctgaacatttagaaggagataatttagaacaaagccacagcttaggtgagctcttctgaattcctacagtcctctcttttatagctttgtataatcttcaaaaatcctttggaaaggaaagctgctcatgcctgccaggcctttctcctagactgtgacagttccttggcttatgacaaccaattccaaagctttacatggtgttctacctgtgggcatgtctgtgtccccattaccccttttaataaggccaccaggcatattgcattagaggaacacccgactctggtatgatctcttcctagcttaattagttacatctgtgatgactctatttacaaataaggccatattatgaaatcctcgggattaggacttcaacatatgaattttaggggaacataattcaatccataacattggatgtctctagttcccctttgggagataacctctaggctccaaggtcctttgaggccccagaagtaactcaaacccaagcccacatctctttaagtgtttctagaaaatacatgttcccactgagagtggtggcatatttattatctgaattttctctgaggcagtattgagggcccctaatcagcctgttgctaaaccagacggggagaaatctccaaatgaagccggtaagggaaggagagcaggcaggcatgagcagctttcctttagaagaagtctgagtccaaccaggtcgaccagcaacttagtctcacttcacttagatatatttagacatggagtgtattagtccattctcacactgctataaagaaatacctgagactgggtaatttataaagaagagaggtttaattgactcatgcttccacagactgtacaggtggcatggctggggtggcctcgggaaactttcaattatggcggaaggtgaaggggaagctagcacgtcttcaaatggctgcagcaggacactgagagagaaggggagggtgctacatacttttaagcaaccaggtctcagccaggcacagtggctcatgcctgtaatcccagcattttgggaggccaaggtgggcagatcacttgaggtcccgagtttgaaaccagcctggccaacatggtgtaaccccgtctctactaaaaatacaaaaattagctgggcatggtggtgtgcacctgtaatctcagctactagggaggctgaggtacgagaattgcttgaacccataaggtggaggttgcagtgagccaagatcggggcactgcactccagcctggacaacagagtgagaccctgtctcaaaacaacaacaacaaaaaaaccagatctcatcagaactcactatcatgagaatagcaagggggaaatccactcccatgattcaataaccttccaccagggccgtcctccaacattggaaaatacaattcaacatgagatttgagcagggacacaaatccaaaccatatcacagagaatggcagcattaagtcaaagcccttggcaagaggtccagccaaggtcacatggagagatgaggagagctaggccctcctggatccaaatcacggtccggagtcctcacataatatgaatcaatctctaaagatgaattctagaatggagctttggcaggcccacacaaggccgacccataaccttgtggatgtgtatctcaaacaatctccactcccccaagttcagcacccacctgaagtgcctatttgtgccctctgccagtgggatataattgtgaggttccatggcacggttctggccagatctaccaacatctatgctttgattaacttcatatttttatttaaatttcttttttttaacttaaatgtacttaattgaatttatttaagtaaatgtatttaaaattaaaaaaaaaaaatcagggtgcctagcaggcagagcagcaatgagtggcagcccagcccgctagttgagacagtggctttggctcctccaggcatgatgtggtggtggccagtgtgatgctgcttggctttgctgtcgccattgtctccatattccacttcgaagagatggttctggaatgaagccaggatcaatatcacattttactggattcctataaagatactattagtggaaagtcctttcagcatcagtgagaaaagatctattttgaagagtatctattatttggactggaatgatgggtcatgaaatcacccatgctttcatgttgaagggatctttccaagaagaatgatcacgtctcaactacaagtggaaaagcaggatctatgtcttgcaatgcctagaaggtatttgtaaaaatactcttaaaaccaaataatgttattaaattcttgctagattctctcacctagctgaaaaatttgaacccgaggcatgttctctctgttaaaaataaaaggccaagtgcagtggctcatgcctgtaatcccaacacttgaggaggctgaggcaggaggattgcttgagcccaggagtttgagaccagcctgggcaacatagtgagacactctttctattaaaaaaaaaaaaaagattagcaagggttggagagctgttgaggacatattagcatctaactgggactttctccttaaagttatcagaaggactagtgaagaactgggaatgaaataactctccccatatgtgagtcagtgcttttcaaggtcccatctgaggcttgcctgggtcaccttgggtacgctcatggaactccatccacacttaaggagacactgacacagtggaaagagaactggacaaagaaccactggtgccactaccaccgtgaggcttgagcaagtcacttccccacaatagtcagctgttggtgtgtaagaaccacctcaaagctcagtggcttgaaacaacatttactgttgtaggtcatgcatctgtgcatcagccagaactctgttgaccttggctaggtctgatcatgtgatggtgggttggttggggctttcccagaggctgggctccaccagcactcatcagctggggcagctccgttctatgtctctcattttcctcctatgggagcccagacacattcttctcatggtgatggcaaaatcacaagacagtagacggaaacacaggaggcttcttagggcctaggtttcaaactagcaccctgtcacttcttttgtgggaggaagtgcaaagggcatggatacagagagaagtgaagtatcatgaccagtaacgcaatctcccataaaaatgcaatctcttgcattcgtttacaaattttgccatttgtaaaataatgacactggactatatgagagcttctcagccttttgacgtcaagagataacatggtatttttcttccgcagattccaaattttgaaaggtgttttgtcttaagtaaattgtatttaacaaagcataatttcttttaggttttttgaaatagtactatcttctgggacctcaattttgaaactattggcttagatactctctaagtatctaatagtctattttttttaaagattctacaaatctattaggtaattattctaagttctatgcttttaaaatattcaagattctaatattttttattgtatacttctaggatcaacagctagtcaataaaactacatttccaaagcatctgtgtttatatttcaaagattctttggatttgtttccaagattcagaaacactgtaagtagtagcacatcttaaaatgttaagtaaaggattttcctctgcattttttactttcctcttcatcctaagatattaactaaaggggctaggcatggtggctcacccctgtaatcccagcacattgagaggccgaggggggcagatcacttgaggttagaagttcaagaccagcctggccaatatggtgaaaccctgtctctactaaaaaacaaaaattagccaggtgtggtggtgcgtgcctgtgatcccagctactcaggaggctgaggcaggagaattgcttgaatccaggaggtggaggttggagtgagccaagactgcgccactgcactccagcataggtgacaagagtgagactggtgtctcaaaaaaaagaaagatattaactaaaggattttcctctacaattttttatgtcatttgttccatttcctcatacaggataaagtctattttagtgactgttccatgtgcacttgaaaagaatttgtattctgctagtgtcgggtagactgttctataaatgccagttacatacatttgcttgatggcattgttcagtttttctatatccttgctgattttatgtccattggtattgattactgaggttgatgtctccaacaataatggtggatttatctatttctcctttcagttctgtcagtttttgcctcctgtgttttatagctctgttgttaagttaggattttgcctcttagcaaatagactcttattgttatttaatgtttctctttatctttagtaattttcttggttctgaagttcactttgatattaatatagtcacttcagctttcttgttgttagtatttgcatggtatatcatttttcatcctttctatttgaacttggatatatcattacattcgaagtgaatttcttgtagatagcatgtagttgggacattttttgtttgtttgttttaatccttcttgaccatctgtcttttgattggtgcatttcgacgattgatgcttattgtagctattcatttgtttggatttaggtctacctaaataataagtctattgttaatacttattttctgtttgtgacttctatttttcattccactattctcccttttctaactttttttgggggttgtttgaacacgatttagtatttcattttaatttctctattgtgtttcttactaaatatctttgtatagttatttttagcgattgctctattttgacctgtcagagtctagagtcaatattttaccactccaagtaaaatatagaaagtttaccaccctatatgtctatttatctttatccttttatattacatttgtcttatatattataaatgttcccattcacacttaaatgtatgttcatgttttttcttttttaaaagggggtaatcccaaatagtataagtttaaggtctcataaaactagaccaagcctgggcacaggggttcacacctataatcccagcactttgggaggctgaggagagcagatcacctgaggtcagaagttcgagagcagcctggccaacatggtgaaaccccgtctctactaaaaatacaaaaattagacggacatgggctaatttgatgggcgcctgtaatcccagaggcttggatgtgagaatctcttgaacctgggaggcgaaggttgcagtgagtcaagattgtgccactgcactccagcctgggcaacagagtaagaccctgtctcaaaaacaaaaacaacaaaaaactagatccagccctacttccgccctccactttctccctgccatccctccaaagagatgtcaggactaaaaaagacaggtagaggctgactcccattcagattcccccttcttggcacaggacagaaactgaggtaattccacaggtggcgtctacacagacagttctgagcagcctcttgcagatttctgtgggtcagagaatcgaggagagccaggcatttcaaggtggcacaggtgaggcatcaaaagctaatagtcctggctgaaaatcaggatgaggagggcacaggagctgccagcatgaagcgatgacatgtaggactagatgttcttcctgttctgggattttgtgagcctctcaggacttaaacaagctggtggggaagaaaagtcttaaactgactgtgattgccacctcaatccctactcttctctgttcccacccaaatgaagccttcttccctagggcttccttggcctctggagtacaaaaacctgatctcagctctctgcaacctccgcctcccgggttcaagcgattctctcacctcagcctcccgagtagctgggattacaggtgcatgccaccacacctggctactttttgtatttttagtggagacagggtttcactatgttggccaggctggtctcgaactcctgacctcaagtgatctgcctgcctcagcctcccaaagtgctgggattacaggtgtgagccactgtgcccgacctctttggcctcactttctcacatcttccaggtctctaaaagagttaccttcacaggacactttctctgaccattctgtataaaacaacactccttctccatcactacctagcccttctccttgactgatttttcttcagagctcttatcaccacctatgacattctatcatacatttatttgtttatttggttttcatctgtcgctttcattggtttgcaacttaaactccgtattttaatatgggttgaatttgcagagatttttatctgatgtgtctatggttatatttcttcctttctccaaaaaaaattcatggaacatagaggcccttgataaacatttgttgaattaattaattaattaattaagtctctgctagctgcatgaatggaagcttaaaaaataaatggtttgtataggaaaaataaagaaagatattcactggaatttgtacctggctcatctatatttggtgttaagatagattgatttttaagtcttgctgtttataagatctgtcctggacttgtttctaagttcctataataccatgacacgtgttaaggatcctagaattcctggcctcagtggctctggacaactcaccctaaaatataaagccagatcttaatgactccaagatgtacaggataagccaacggcacccggcttgatttcacacagcagttccagcttgggaggataagtgaaaagattatcacaaggaaattgtttacagggacaagcaagctccagacatggccatcaccacctcagggccctggctggtttttgtttcacataagcagttttctaagcaaagagaaggatagaacctggcatggttttgtaggtttatgtagctccagggatgaaaggggggcacccacagaggtcagggatgtctaagtcatcaaggagaggaaaggctctgagaacttgggcatcccaagaggtgacaggatggttctggcttagggccaacatagccacatgcctacagggaccaggcaagtagcctgacccctgtgacttaaacaagcagaggtggccaggtgggggccaaagcagacaggccatctatatcccttctcaagggggtaactctgactaatttttgctaaacaaggatgaaaacccagtatagccagatttattttatttttcattcaaagtcagaaattcaggtttgcatgtgaaagctcccaactttaaatgttggcatgaaaatcagattttagaagcactattttccagttaatatttccatgtaacaaatcaccccagatttagtgacatcaagcaaccattttatgatgtccatggattcttcgtgtcaagtttggacagggcaagtggggacggcttcactcagctccatggtgtgtggggcttcagctgggaagattcaaatagctggagctagaatcatcgagaggcttctctactcagatatctgctctctgggctgggatgactcaaaggctggactcggctgggactgtccactggggcacctacacatggcttctccatgtggtctgagcttcccacagcatggtggctgtgttctgagacgaagtgtcctgagcgtgggagctgcagatgaaagctgcatggccttttatggcctggcttcagttccatagtgtcacttctaccatactctactggtcaagcagccacatacccacccagatccaagggaaggggagcacagacttcacctcttgatggaagagcatcaatgaatttgcagccatttataaaagcaccacacactgtgtgggccacaccaaatgggtctgcaggctggatttggccagaacattgctggcagcatctctgaagggtggaagtagactatggcccagctcacatagtgaagtgaggtagcaacatccccagaatatgtatatgggtatggggccaagacagagggtgcctgcctgggtgggctgccactggagcaaacggccatgtgggactgctggtccagacaccagcattctgcctgctcacagccttcctctcccctgaccacagacatgggcccatcccaagctacagcctgaccccaaaacacatcttcgccatggctgagtcatcctcttcctcagggacccaaagccccaaccatggtcccttcttcttcctctctaggaggacatttttttaagtccttgcacctaaagggctgatctcactctttttctaggtgccatagactcaatgtgtccatccaaaattcatatgttgaaacctaatctccaatgtgatggtgtgtggaaatgagccctttgggagataaagcccttataaatggggttagtgcccttatgaaagaggtcccagggagatctcttgtcccttctgccatgtgaggacacagtaagaagactatgaacaaggaagaaggccctcaccagacaccaaatctgccagtgccttaatcttgggcttccaacctctagaactatgagaaataaatttctattatttatttataagatagccagtctatggtagtttgttcaagcaacatgaacagactaagacaccaggcaatctgtcataagtgcctctgatgggcccaagtgttcccaagttggaaataccttccttacgcatcactgtctcagaggtgatccctagaagagtgcacaggaaagaatatgcaagggaaacaaggatagccaatgcacttttatgtaatacacacaatgaccctgtgaagcaattattccagtttaagagatgaaaaaactgagtttcacggaaaatccaaaacttgccagggacacccaggaaaatgggtggtttcatactaggtggaactggggaattggcttcaaagtgcaagtgagcaggacaagagaagaccagcttgcttagactggaggaggtaggttaggcagaagtgaggtaggccaggtgggaccaaacgctaaagagccctgcaagtgccacaaagtgtcatgaacttaatgagtcaggcagtagggaaccattcaaggttctcgagctgagggataacttcactaattatggccaatgatgatgcaagcaatttcttacagagtgctttattttgcagatctccttttccatgcgtttcctcatttgtttcccacctgtgtggttaggctccccatttgccatatgagcaaagtaagagtcccagaagttacaatatgacaaaattactactagcaaagccaacacaggatgcaagcctcctccctccacaccccagtgaagggcagtggggactgcacgatacagtgggcatctgccattcattctggccacctagcatcattctccttcagcccttcgttccctttagggaactctccccctacctctccaaatgattttaatggggctgtcaatcatgtggtcctatgcaagagtgagcaccaggccaggctgaccaattagagtccttctcagggattgacatggatgctcggggaaagacagtctcaggttttctctagggttgccaatggcaatgaacctctgacaactatccttttgtcatatggggaatatctgcttgagaatgacgtgaacaaacaagacacccaagctgagagataaaggtaggaagagtgcacctaggacaccaataagatcctacagattcagccatgtctgggtttctcagttttgaaaaacactttgattggttttgtcacacgcacctgaatcagcccttggacctaagctttatttagaagtaaaatggacttgggctctctgtaaaccacaatttcttcatttatcaaataataataatcggctgggcatggtggctcactcctgtaatcccagcactttgggagccctaggtgggcagatcatttgaggtcaggatttcaagaccagcttaggcaacatggtgaaaccccatctctactaaaaatacaaaacttagctgggcatggtggtgcgtgcctgtagtcccagctactcaggaggctgaggcacaagaatcacttgaacccaggaggcagaggctgcagtgagccgagatcacgccactgcactctggcctgggtgacagagtgagaccctgtctcaaaaaaaaaaaaaagaaaaaaatgagagaataatcaaaatagcaacttagcaacttagagagtttctggagaattaaatatacttcataaactgtgaggtaccaagaaaagaaaagaaaactgtattgagggacatgaaggcctaagtaaatggtgaaatatggcaaattcatggatgagatgtctcaatattataaatatgatcattttcttcgctatttaatttacaatataatccaattttagacaaaactaaattaatgaacaatgcaaattaggcagtattttaaaacagggtggctattttcaaaatgacagtgttaatatttttaagttgaggtgccattatgctgagatagctccagtgctttgggttcctatgtaagcaaatcaaagcctaatgtaaaccgtaaaatgatcctggagacttagctaatttgaaaccgccaactaacctctagggactttccaccagatcgtgcccaaataaggcaaacacctacttgtagccagtcaagcaatgtctttgctttgcttccacattcaccctataaaagcctgcagctcaactgctaaagtggagctctctgaacctcttctagctctgagtactgcccaattcatgaatcacttttttgcccaaataaactctgctaaatttaatttgtctaaagtttttcttttaacaacagaatggaccgtatttttagttcccaaagctctctcttgctccctataagagaattatacttcctgtgccattgacatcaggcctggacatgtgacttactttggccaatgatatatgacctgagtgaggtaatgccacttctaagcagaagccttaagagccaccacgtttccactgtggcttttctctgccttccaccagaatagtgtattccaaatagggttgttttatcagctgggtcccaggaagaagaggatttggccagagctgcagccagtcctgagtgtaaggtgaataagaaataaatatttgttgttgtaagccagggagatttgacggttattagttatgccagcataacttagggaaactgactaacacagaagtataacctaatgaattgacaaaatgctgccatttttatgcttcattaaaacataaatgaaaactttttgtaaaatagtacctagatgctttacattggtttctcattgttctgctaaacatgagcattcccaaaaatgtttacaataatttatatttttaaaaaagcattttgtgagcaaaacaagcttggggaaatgctgcaggtcactgtctttctcatgagattcatccctcatattagcatattaaagtctctgcaaagtcctacagtaaagaaacctttactaactcagtatttcttgaagttatttggtgatgaacctcagcccaccaattaacatgtcatgagagatgaggatacaggtttttctcaaaatgagtatttttctctcagctatcatggatttagcactaggtgcatgtattatttaaatcctataatgacccctctgagagaggcatcatcagttcccattttatatctgagagaaaataaaggctaggagagagaaattgacttgctcagaaaaaccacagcaaaaatataaatgaatgaataaatgaatgatggagccaggacttgaatcacaagtctggcaataaagaccaagctcttaacctaccttcctcttgcctccaaaatcaactcctggattctggagctaatgatgaaagcccttcatcagttgaaaccacagtacctacccaatccaatcctctccattttactccacaccacacctcctcattttccacttaccatctttttggccatttgtttctcactaagggcattccttcctgccaccatcctaacacatcttttccatccttaagctttaagtcttaacttatgatccctcgtccaagaagcctcccttgattacttttcccccagcaaactttctctgatattacgtgtatagatagtggagcagaacatttccctgagatgcaaattttcagataccctctcagacctactaaatcagaaactctggagataggaatcagaaatctggactttaacaagccccccacgtaagacaatgatgtacttcaagtttaagaaccatgttggtctaagccaaccatgttggttcctttccctgactagcaattagcttagtaagagacattggaccaagttctggacagagatgtgagaggaataggcaagaaaggggcatatgggggaatttcctcactctaataagagacatactgaaaaaggctatacccattaaggtgttttttatttcaagcagtaaaaaatctagctaacataggcttaaataaatagaaattttatccttctcattttcaaaaaatctagaggttgacagtgactgtgatgctagtcatcacaggctcagcaatgtctgtgattttcttggcctctccttctgaatacaggatggctgccacagttcaggcatcacatcatattccaggcaggaggaggaggtagggaaggctgctgcaagcaatgtctgtttctcttatcaggaaagtagaggcttccactcatttctcattggctggaattggccatgtggccacttctggcagtaaagtggatattcaacttttccagcctccttaatgaagacaggcaaggaagggttagggctgatatggggcaagcatatccaaagcgtcttcctcactgagatcagttctagcttctcgtagctaaaaagcttcctgacaggaagtgttaccggtttctttctcagtagttggggggaattaataaaatagtgtatgatttaggcccagggtggtctcaaaaacgagataaggattcaccacgattggtatgaacttctccagcatgactctccacttctcttatctgtctttatgttttctacagaatcattcatctgagaatatcagggacatgggcccttagaattcaccaacagagtgagcaagggagaatggttctggttctgaagtgagagagacccagggttaacttttggtctgtcacttctacctctctgagcctcaatttcctcttctgtaaaatggggttaatgaaagcccgcatctcccccagggcagatatgaggatgaaataaagttcaccatataaagcaatgagctcagtgcctagtactaagataggtgctcagtgaaccggtacctattactgtcatttctctcactattttagcacaaacctctttttgtgcagccgaggaggttgctgttatgatgtcaggccactgaaaattagtaggcaggtttcttattacgcctccttaggggttgctttaacaaaagcaaaactaaattctcattagcacatcactcatttccatgtacatgagcatcatcataggcatgaaaatggcacccttgagaggagggggaagaagatgcctcccccttcagcccctttatcagaagatcaagcccagtgtggggaggggaggtcagtggtcgttcctcctattccaggacagaggtggccagcattcctagctgccctctgcacttcctgacatttgtggtttaatcaagccccattaatccctccctgtttcaaagctcagcacaggaaccacaaactcccacagcctctgacaggaatcatgtggctaaagccaaggggaactctttgaaaggtaattagcatctttgaattcagggccctttgattttgcttcctggctttaaacgatcacagaacattttgcagaaaagggggaaaacataaaggcagcagctacagccccttacactgggccttctgcagcctttcaagttgtgatgtggcctgagagaggaaacttgcaaatatgattaagtgtgggtgagttgttgagttgtaccaggggccatgcattcattcattcattcattcattcactcagtctcacaaggcaccatgctaaacactggatgtacagttttcattgatcattcattcaatcaatcattcatttactaatatccctggatcaaacactgagctaagctccagggctataagtttattgtttaatgggagaggcagacaagaattaaataaataaaaacaattgctgttaagaataaagtaccaagaactaaataaactgagtattcatccagcgaggagaaagagatcatctttacaataggtacttagggaaggccactctgaggagggaacagtgcctgtaggcaccatgatacatagaagccagttatttaatacagggcataaggggatcatatgtcaatagaggtttgtactgttgccatgtttgggaggattaaggaaagccgcagagagcagatgtaggagtaagtgtaagccagttaatgctgttgttacaaccctgaagtctgaaaccacagaggtagatattttgctcaacacacgtgtcgtggtttggctgtggctctgctcacaccatcatcgtcatccttactccagggcccagttgctgaggcctaaagaagagagaattctcaagggtttcaaacctgctgttaaatgctccagcctggaagagacatgtgttacttgtacccacaactcattgaccagctcttatcacataacctcaatccaactacaggggggccaataagcagtatcctacactgtgtctgggagatacagacatgtttggtgaagagccacctcactgtggactgagctttgcagcagagaagcaggacatgtgaattgcagacagaggaaatagaatgtgcacagacacagagggataaaatagtttggagtgttcgggtagctagagtactggcagggcttaaaatggagctgaaaaggtagccataaaaccccctgagatgggtactattatgattttcatttctgagatgataaaattgaggacacaactagtgaatggttgaactgatacttgaactgacacagtctgatcctagcatctgaacttttaatcctcatgccatattgcctttaaggtatggagggaccagaatacagaagatctttaatgccaggaaggagatcggcctcaacaggctaagcagtaatatttttacaagtcttggttgtggttgtttaaaatacacacattttttatgcatattaaatatacagatacattcttctttcctaataagaaatgcggtcccccttgattatttttaaaatgggagattctcttagtgtatcttttctttgccgtcttttgatatagaagagctttcagggaagtatttctttacagtaagaaacaacccaaggataattgttaataatcactgaaattcattttctcctttaaggatacagtcaggaatggtgggatctgtggtaaactagaaagaattatgtctcttgcaaagagggaagttgttgttcacttccatcctattgtcacatgtggaaatgtggaataatttaaatattttagatattttgtgaaatctcacaattttaaaatatcaacttaaagcatggtacaagcctaacaaaacacatctgtgagccaaaatgctcatggaagcattgatttttgtcttccatatggtggccagcctctaagatggccccaaattatcccacatcctggtatttattcctttgtgtcatcttttctacattgaattacaactggcctgagtgatcagtagaatatggcagaagtgacagcgtgtgacttctgaatctagctcctaagggcactgagcttccaccttgttctcttagactgctcactctgaggacagcagtcaccatgccatgaggacacttaagctgtcttgtgttgaggcccatgtaaaaaggaacacaggccccacccagcctatagccagtatcaactgtccagctatgtaagtaagtctccttggatgtggatctttcagccccagtcaaaccttcagatgagcatagccccagccaatacctaactgcaacctcatgaaaggtcctgagccagaaccacctagtcaagctgctcccaaattcttgactcatagaaaccatgacagattggtaaatgactgttgttgtgtacagccagtggttaatgaactatctctaaagggcctaaaaggaagtatttttgtctctgtcacgataattcaactctgcaaaagcagctatagatgatacataaatgaataggtgtggccgtgttccaacaaaactttatttacaaaaacaagcagcaggccagatttggcctgaggattttagtttgtcaactttgagtttaagccactatggtttgcaatttgtcatgtggtcatatataactaatccactccctgaattcgtgaagtggcctgaatagaacatgtttcagacaaagcacattgttagtaatttagaggccaaattagaagaagctagtggaagggtgagcctggaagggcaacggttctaggaagagatgatgggcccaggcttgggtggggagatgtatgaatctaggtgaggcataactgtcttctgtgctccctgccaatcaacatgacaaggaggatgttaaaaccataatggagaccgttgcctttaattctcccttcagtgtctggtgttgcccttgaacagtcctggtaacgagcaaatggagcagacagggaggaaggctttcccccacaatgctgcagaaaactcacagagccagcacaatgtgtaagctcctcagctggtaacaagatgcttgacaccagctgagccatgagcccagaataaagaaatgccctgtagaagattccaggaacactggctgttgcccagtcactccaccccttccatgcacactctgccacctgttcctctagcccctctgaggaccccattcccacccctgtgagtcaagggagcagtgaggccagtgcacatggacagaccagagccagaaacgtctgcaatacgatgggtagggaagcaagggtgggggaagaaatagagatagaagatggagaaataaaagggaggagaagaaggaggaaaggtgaggaagagagaaccaatagtccagaagaggctggatgcaaggattggaaaaatgaatcgactgggttcaattcaaacccagtgaatagaaccccaggcaaaatctggtctctgtcttgatccatcagtgtggacctcattctccagcagtctaggtgactacagcttctggattccaaatccacacaaagcaatgtcaatcttccagtagttttgggattcactctaattggctctcagttcatgtgccttatacctgaaccaatcactgcagttcaggaaatacctaattctgatgggctttcatgtcacaggcccacatacctgaaccaatcaccatggttcagggaatacctaactctgattggcttgagatcaacactccaccttcgccctcccaggctgaaggaaggagaggactgaatcccaaaaagaaaaccatgacttttgccagaagaaaaaggaatggatgtaagatgaatccttttgagttctacttcctgctagaacttctgggagaatgatttgtcaagcatcttccagtctggtgcaaccattattagacacccactgtgagagctggaatggctggttgacaatttccgttttgatttcttcctctgatcaggcccagagagggaaggatgtgcctgcataggcacaattctaggccttgggcaccaagtccaacactctctggcaacgaggtaggccacgagtcagactccaaaaggagtcgatgggtgggtagggtttgtgtgtgtggcaagcagggaggacagagcttctctccaagggagctctgcttctttggctctctcctcctttgaggacctaagagtctggtgagggaatgagacagatacatgagtgtggtcatggcattatagagggaagcattatatagggggtgggggtccaaacacaggcccttgctcagcttgaggaggtcaaggaggctgcctgggagcagtgacgtttgagctgaattttaaaagatgagcaccagttagctggaaagagggaaaatgccttcccacagatgagaacaggtacaaaagctcatgatgtggttgtagaacagtaaatgacaccgtgcacctggatgcaccagtgaggagtgggtgatagacctgaggatgtcggcaggccctggtgacacagttttctttttttttttttttgagacagagtcttggtctgttgcccaggctagagtgcagtggtgtgatctcagctcactgcaaactccgcctcccgggttcaagcgattctcctgcttcggcctcccaagtagctgggaatacaggtgcctgccaccatgcccagctaattttttagtagagatggtgtttcaccatcttggccaggctggtctcgaactcctgacctcatgatccacctgcctcggcctcccaaagtgctgggattacaggcataagccaccgtgcccggcccacagttttaagttctacagctgaagttgagtgaaggcttgatattcttctccacctctgtggaaactgggaagggcaggggaagattttacgatggggagtgaccacttgtaaatgtgccaatggctttgatcttggagggctgaagggtgatacagatgtgtgaatcaggattcctggttgtagggagcagaagccagccaactccaaccaccttggcccaagtgcagtttgggaagggatcctggggcaacacatgttatcaatccaaattggctgtatgaagcagccatggggaggtgacaatataacttggtgttttctttctggaaggcatttgggtaaaatgagctagattccacttttaggaattcatccaaagaaattcatccaaagaaaaagtaaagatgagagcaaagatttagtttcatacatgttcattgcatcactgtgtatacaggaaataataggaaacaatctgaatgtcccacagtagaagcccagcctgtgtaatgagtctgatggtggatggcccttcagtcattccatctgctgctgtggtaaggattggtaattcccaggcatttttgtccatcggctaaggctgctctatgaaaatgtttttgctagtctatagtaaaatcagaaaaacagagaccacaccaaaatgttcacaaaacttttttttttctgtaacattatctctgctcaacttctttggcttggtgatgataatggatgttgactcatttcatctttccaagacgcaaataacaaaaaatacaattaacaatggcacaaacaaataggggcttactttttaacatgaaaagaagtctggagatagatgcccctggggaaatatcagtgctcaccaacactaggcagataggggtctctgtgattctctggccctttctttcatgatcccaccatggctgtcactgttcttggcatagtgttcatgttcaaggtaggaagagggagggtgaaatggaaccaatgattctttcccttcctcatgtatctcattggctaaactgggtcacaaggacacccttagctgcaaggaagtctaggaaatcaagaatctggcagagggaatgagattaccgtgtcaggtttactaatggtgattaattgcccaggacagggtacctgagcccctcaaacaaaactaagaaagaaagggatagaggagtaggaaatggttactgagtgagcagctaggcatgcctgccataactaatgggaagaaagttggcaaccctaggtcagccccccaacaaccctaatttttggaaggtggaatttactgctccatgaaatgatggacactaggaagcactggaatagaagactgattttcaaaccagattcttgtgttgcccagagttattgaggggctgctgttagggcaggaaggtggaggaaggggtggagatactggtccccaatcttcctgccacttttattggagtattatattgagtatatgcataaaattatacttgctgtacagtagtgcccccttatcctcaagggataatatcttttttttttttttttttttttttttttggagatggagtctcactgtgtcaccaggctggagtgcagtggcgtgatctcggctcactgcaacctccacctcctgggttcgagcgattctcctgcctcagcctcccgagtagctgggactatgggtgctcgccaccacgcccagttaacttttgtatttttagtagagatggggtttcaccatgttgcccagaatggtcttgatctcttgacctcatgatccacctgccttagcctcccaaagtgctgggattacaggcataagccactgtgcctggctcaagggataatttctaagaccccctgtggatgccggacactaccgctagcaccaaacaacctgattaccatcaatcagaactcatttctgttcctatcttccacccacaattgtaatgccttttccattttaaccaagcacttattatatactatggccataacttttgcagtttgaggtatgacagcaaaattagcatacatttcattttccttcttcacattttcatagatggaagagtctttcttaccacagatcatagcaacctcggcatatgacttttttctttccctattaagtcaagaacttttatcttgacttttcacttaaaggaagcactttacagcttctctttggcatatccaaattcccaacatcactactcttgcactttggggctgttgctaagtaaaataagggtgacttgaacacaagcactgcaacaccaggacattcgatctgagacctgagccaactacgatgtaactaacagtcggggactgtgtacagcatgggtatactggacaagaggataatttcatcacactactgagaatggcatgcagtttaaaacttatgaattgtttatttctgaaattttccatttaatatttttggaccgtggttgaccttaggtaacagaaaccaaggataagtggggggtattatatacatatatgtatatatgtatgtttatctgtatatgtgtgtgtatatgcatatatgtgtatctttacatatatacatacatacataaagatatagaaggatacatagcagggatttcaaactggtggcccctgaagtggaaatcaatatttaaaatctctctgacttttgaattcgtttacacctgactttgtattctccattacttcacagattcagacattcctgattttttaatgtcaaagttcacatatttgtattaatatttatataaattaactcaccctatgcacacatttatattaattttactaccacccaattcacatttatatcaactgcctggccccataagcatttagttcgtgactctgaatatgcccaggcattaactatggttctctctaggtcatgagtcgtttttaattttttctttttcctggtctgccctgtctaattttgctaaaataaacaaacatggcttttgtaataatggagaaagacgccattttaattaaaaagtaataacaatgtggcctgtggccctctgggctgtttgggccacgctccactggcccccactgagcctggcttttctgggctgctgctcttcctgcctccccagcctgcctcaaatgtgtcgccaagtgagcggctggggtcccttcctttccctgtgactggggtccagtgagagctggcggttggatactgtctgaagaatgggcccttcctggaagcgtttggaaacccagttggggtctgaggtcctttcaaacgctgaactcaagcgtggggactcagtccctggaaatgccaactgctttactctgactgggactgttgatagatatattgcttcatgctaatgtggtattatcacaacacagttccactctcagctactgcaagtcactaagacaacatctggtttgaatcttttctcattatggcctaaaaaaataaaagctgaaatccaaaccactcctttaacactctgtctctcttttttcttcctctcccttttctctttcttttgcactccagaaacttcaaatgagggggaggagtttagaaattgtccatcttatgtgcccttctccccattttacagatggggacgctgaggcccagggaggagcagtgacctgctatatcacaaaccttgttaaggtaagcagctcaagtctcccaggtttcttatctgcaagccaggatggcactgacctctccccacatcacctttaagggaccccctcaaggggcagacaggatggggcatggtgatcagtaaggagcctaggcaagcattagctgttgccaccgtccaagggcttctagttaattggtagcagaattaggtctttctagaatctgagtcctctgatttccaatggtaatgtactctacaatttactcgggaggaaggactaagatcataacactaatatcttctaacgtgctggatgctccactaagtgttttatgaatagtgcaacatcacagaggagagcaacgtgctggagcccagctacgaccttgagcaagcacatcactcttgaaacctctttccacttgtgaaaaatggaaacagtaatggggtaacgagattgttaagaggatgaaatgagagcttgtgtgtatagggctaggttttaccatgatgcatacatgtgcacaaatgatgcaggctttactttctctaatggatctgtgtgtgtgtgtgtgtgtttgtgtgtgtgtgtgtgtaagaagctcctggggatcttgcttctcctctctctacttcttctctacttccttctctctacttctctttccctgacttctctctcttccctgatcttccttcctagacacacaggacatccctaacaacttatcctagattttttctacctatgaaaaaataggtagaaaagtggatcttgcttatagtcaggatccatcttgctgcccagcaggccaggcttttcatgtatggatgggaacctaaagagttggaaagattagcttctctctaaaaaaaaaaaaaaaaaaaaaaaaaaacactggctttcaagactatttctttgtgaggaacccgtaattcctatttggaaggtccaaggttcaacataaacttttttcccttgagctcctgctgtaacactcttgatccccactgatacctctggctttctcgggagaaagctaaggaacaaggaaagggaaagaagaaaagcccagtgaaatatttcaaaatcttagtccttattacacttctgggaagcatttactcagtgtctggaacttaagtagaaatcagtgatctcagcgattaccctttttttcacgtattccccacaatagtagacattatcattatctatttgcttcgaaaataagccattttattcaagtataattcatatacagaaaagtgcacaaaccctaagtgtacagattaatatcaaagtgatattaagtaacacactaagtgactgtcactcttcatattccccccctcctcatgttccctccccttccctgccccaaatagcaacctctctcatgacttctaacaccatggactcattttacctgttttttcactttatgtacatggaatcatgcagtacagtacagtattgtgtctggcttctttcattgaaaattataattgtgaaattcatccatgttgttgcatgaattagaagctcatttatttttgttgctctttagttttctatatatgagtaaaccacaatttatttattcattttactggcaatgtactttaacatttttcccagtttggggcttttgtagaattctatgaacactttgtatttgtcttctggtgcacatgggtactcatttatattaggcataaacctaggagtagaattgatagtccacagggtatgcatatatttggctttattagatactatcaattttccaaagctgctgtaccaatgtaaagtaagatgtataaaagtttcacttgccctacattcttgtttatacttggcattgtcagagttttcctttttagccattctggtgaatgtgtagagttatctcattgaggcgtaaattttcctttccctgataaccagtgaagctgagcacattttcaattgcttattggccatttggatattctcttttgtgaagagcttgtttgggtgtgttgtccctttttaaattgaattgcctttttcttaacgactgaaggcactttttatatgttctatttgacaagtccttttttggttgttcatacagcaaatgtgttcttttactctgtagtttaccttttgcttttttgataatgtctttggatgaacagacattcctaatttcaataaagtccagtttatcaatcttcctttatgattagcatttctctgaaccatttaaggaatctttgcctaacctaaggacaagaatatatttacctattgttttgattttcaaatttagattcacaaatcacctgggatttatttatttattaatttaatggtgtgaggtagggaattgtcttagcttaggctgctatatcaaaataccatacattgagtgtcttgaacaacagacatttatttctcacagttctagaggctaagaagtccaagatcacaacattcagtttctggtgagggtccccttccaagtttgcagatggccacattcttgctgtgcttatgtggcctttcctctgtgtgagcacatggagagagagagagagatctctctgtcttcctcttcttaaaagggcactaatcccatcaggaggagctcaccctcatgatctaatctaagcctccttacctcccaaaatcccatctccaaatatcatcacatttggtgttagtgcttcaacatatgaatttggcatgggtggggtgaagggtaagggggacaaaaatattcatcccctaacaggaatcaaggatttattttttcccaaatggacatcctattgccctatcaccatttattgaaaagtctgctttttcctcactgtactacatggtcatttttgtcctaaatcatcacatacaggtggggctgtttctagattctgtgcattccattggtctctttgtgccaatactaccttacctcaattactgattttataatttacatctctgctagagtgaaatcctaatttcttcttcaagattttatttggctattcttggctctgggttttcatgtaaattttagaataagattgactttttttttttttcaaagaaagaaagaaaaatttcctgaggcttaatcaagactgcattaaatttgtaggcccaatcaggaaaaggtgacatcactgcaagttgaacaaacatgaacatagatgatacccattttagagataagaacattaaatttaggatcattaacggagaagtgtgacccaatcatctctgaaacaggatgatcacaagccctgataaaacacactgtcaagattaactccttggagcttgctggaggagctcggagcttggcaagagtagtcctacactcaatcagtttgagaagagaaacagccttggccaggggaaggaccccagatgacagaggtagatgggcttaacatgttcctacccctacacagattaagtgtgccttgagcccatcacctgtcttcactgagccgcacatacttgagagtcatttttattctgcttctttctttcctgctttttcttctctaacaagtggaggttgatataggacaaagaacagttaatttattcccccattcccctaagccttattttaaaagttaaaaaataataagagctagtgtttaatgagcttaccctgtgtctagcagtgttctaaaacttttttaaaattaagagataatttacatactgtaaaattcacccttttaaaagcatcaaattcagtggtttgtgcaacgattgccactatctatttccagaatatttttatcaccctaaaaacctcccactggagtgaaccctaatgtaaactatggctttaggtgataatgatgtgtcaatgtagattcactgattgtagcaaatgtaccactctggtgtgggattttgatagtggaggaggccatgcatatatggggggagagggtatgtgggaaatctcagtaccttccactcaattttgctgtgaattgaaaactgctctttaaaaggtctattaaaaaagaaaaaaggaagaaacctcatacccattagcagtcacttccaattccccctcccacaagcccccagcaaccattaatctactttatgtttctaaggatttgcctattctggactcatatgaagagtcgtacaatatgtggacttttcagtctggcttctttcacttagcattgtgttttcaaggttcatccatgttgtcacattgtcacaacaaagttaacaaagtactgtatcagtatttcattctttttgatggccgaataatattctattgcatggctacatcacattttgcttatctatttatcagttgatggaacacttacgtagtttccaccttttggttaatatgagtaatgctgctatggacatacatgtaatagtaatgctgctatggacatacatgtacaagtttttgtgtgaatatgtgttttcacttctattgagtgtataactaggattggaattcatgggttatagtcatgggacttctaggtttaactctttgaggaaccgccaaatcgttttccaaaagggatgcatcattttacatttctaccagcaacatatgagagttccaatttctccacattctcaccagcatgttattgcccctcttttttttttattataccatcttagtggatgtgaagtggtatctgattctaattttgatttgcaaaagactaataatgttgatcatcttttcatgtgtatatcacccatttgtgtatcttccttggaaaaacgtctacacaaatcctttgtctttttttttttttttttgagacggagttttggtcttgtagcccagactggagtgcaatggtgcaatctcagctcactgcaacctctgcctcccaggttgaagcgattctcctgcctcagcctcccaagtagctgagattacaggtgcccgccaccacacccagctaatttttctgtttgtttgtttgtttagtagagacagggtttcaccatgttggccaggatggtctggaactcctgacctcaggtaatccacccgcctcggcctcccttggtccatttttaaattgggttgtggttttttaattcctgagctgtaggagtatatattctggatatttagacccttatcagatatgtgttttggaaatattctccaattctgtgggttgtcttttaattttcttgatagtgttatttgaatacaaacatcttcaatttttcttttggttgcttgtgctttagatgttatattgaaaaaaacattgcctaatccaaggcaatgaagacttactcctaaattttattctaagagttttatagtgttagctcttacatttaagactttgatccatttttagtcaatttacatatatggattaagataagaatccacctttagtcttttgtattctgtcattccaggaccatctgttgaaaagactattctttggccaggcatggtggctcacacctgtaatcccagcactttgggaggccgaggtgggcagatcacgtggtaaggagtttgagattagcctggccaacatggtgaaactccatctctattaaaaatacaaaaaaaattagccaggcatggtggcacacacctgtagtcccagctactcaggaggctgaggcaggagaatcgcatgaacccaggaggtggaggttgcagtgagctgagatcatgccacttcactccagcccgggtgacagagcaagacttcgtttcaaaaaaaaaaaaaaagaaagagaaataaaagactattcttttccccattgaattatcttagtatctttatcaaaaatcaattgcccataaatgtatgaatttacttatttctggactctcaattctgttccagtgatctatatgtctatccttatgccagtaccacatagtcttgattgctagagctttgtaaaagatttcaaaataggaaggtatgagtctgccaatgtttccttcttaagattattttgacctttctaggtcccttgcatttccacatgaattttaggaccaacttatcaatatctgccaaatagtcagctgggattttgataggaattactatgatctataaatcaatttggagaatattgccaatattatctctttcaattatgaacacagatttcttcccatttatttaaatctttaatttctttcaataatgtctcatagttttcagtatacaagtcttctgcttcttttgttaaatttattcctaaatatcttatcctttttagtgctattataaatggaattgttttatctcattttggattgttcattgctgatgcacagaaatataattgattttttcattttgatcttatattctgcagccttgcagaatccttttattagccttattagctttttttggtgaaatctttaggattttataaagatcatgatgatgtcatctgcaaatagaaatagttttacttttcctttccaatatagatgccttttatttcttttgtattgttattattatacataaactgcatgaccatcaacacagattcataaccatttctttacacagtcatcttttaagtcagataagaggaaaaaggtttataaaaatatataaatatttacataacatgtatttctactgtatccttttactggtgttctttatttcttcttgtgaattcaagttgctgtctagagtgcttttattcagcctgaagaattctctttagtatttcttaaagaacagatttgctaacaataaagtctcttagtttttgcttatctgggaatgttttaatttctctctttttttttaaggaaagctttgctggatatagaattcttgattgacaatctctttcagtgctttgaatgtgtcatttcatcaccttctggtctccatggtttataatgagaaatcagctgttaatcttattggggatcccttgtacctggtgagcaattttttttcttgctgccttcaagattctctccatgtgtttcactttcaacagcttgattatgatgtgtctacatgtaggtctctgagtttatcctagagtgtgttatgctgcttagatgtgtaggtaaatgtttttccatcaaattatttcttcaaatattctgaatctttctctcctttgcttccggaactcctgttacgcatatggcattatgcttgataatgtctcataggtctttgaggctctgtttatttttctttattcatttttctttgtgtccttcagactgactactctcaattgacccaacttcaagtttgctgactttcttgttgcctgctccagtttgctgttatgcccctctagtgaatttttaatcttagttattgtgatttccaactccaaaatttccatttggtccttttataaatctaattttaaatctctttattgttattatctatttggtgagacatcattctactttcctttagttctttatacgtgatttcctttagcatgtattttaaatggattatttaaagtctttggtaagttcaatgtctgggcttcctcagggacagtttttattgattcctttttctcctatatagggaccagtttctccttctccttctctttctccttcttctcttttttctcctttttctcctcctcttcctcctccttctcctcctgcttctccttcttctttatttttttgagatagagtctcactctgtaacccagactggaatgcaatggtgtgatcataactcactgcagccttaaactcctgggctcaagcagtcctcctgcctcagcctcccaagtagctaggactacagtgcacaccaccacaggctagttttttttaaattttttagagatggggtcttgctatgttgcccaggctggtcttgaactcttggtctcaaacaatcctccctccttagcctcccaacgtgctagaattacagatgtatctggccacatggccatgagacactgtacctggccatagtttcttatttattttcatgtctcttttttgtttgtttgtttaaacctgaatattttacataatatattatggatgctttggaaattatattctagcccctccccacatgttgatgttgtggcatttggtttttttaagtgacttttctgaactgcttctataaaggctggatccttttgtctgtatgatattgaaatattgggcagaaatttccttaaatgcctgcaactaatatgtctctcagtttttgttgagggtctgtctgtatgttgaagcatattcaaaactcaggtaggcaattgataactctgccttagccttcacgttcggcttgtgcagagcctcaaggtcatccagaggtgatagtttagggccctctcaagtctttcctgtgcgcatggacagccctgggcacctgtaccaccccacacatgctcatggccttctagattcccaggaaatgtcagagcttttcaaagcccctataggacatcttactctccagcttttcctttaaagctttttggttagcttattgtttgccccaaatgttatttacaaccaatgcaatcacaaagttaaataattgcctctaaacgtttttgacaaataccaccagtgaaaagcaagagaaactttttgcactgggtaagctctgagtcagctaaaataaagacaaccttgcaagtggggtcttgcagggaatcaccagacgggccgacaaggacaactccagggaatgtagctttgaaggagcttcaactctattttgtcctctctggtggctaccagtttgatagttttcaccataaatgtggggctactggtttccaaggctaccacagagctgaaaagagggggatgggaatagggcgagtaagaacatcacagaggtcactgttcttatcaagatttagccttttttcttgaataaatgttccctcaattgctgcacgcctttgattaatttcaagattctgaaaaagttgattctgatcattttatttccacttttcttatcggaggaaagaatttttcagtcttcctccaccatttttactgatgttacctctgttctacgccagatattgccttatgtaattttcaccacaactctatgtggtaggtattgatttttttattattattttctccattttacagacgaggaatctgaggcacagagaggtgaagtgacttgccccaggtcacacagccaacaagtggtagagcaaggattcaaatgcagagtttaactctaggcctggaattctcactgggatcttttgtctccctagaagtgggaaaggaacactggctttgggagtcaggaagtctgaattcaagtcccagctttgctgttgtccaattatgtgagcctcagtgcactgctctctctctgcctcaatttccccatgtgtaaaatgaagtcgttgactgatatctcctattctctccaagagtttgggtttccccagagtgagaactgcccaccagacataaaactatgacctctgcatggggcccaggccttggcactgctgctacaaagggtaacctgtcctcccagagcccttccttagtgggcaagagcagccatcacaaagtgctctagcccagcccagtcacttgggtgctttaggtgactccagaggaggcttttgcctgccagagctgccactggccacaggctcctttcacttgtgttgtagatcccagagcactaattcccccactggctcctaggcggtgctgcccaacaccaaggaaggccaggctgagaaggggaagtctttgctccatcctctgctcctctcacttctactccccatcttaattcccctcccatcaaagcctgcaggaacctgactctgctttcagtccatggaataaagggcattctttaaaaatatatacactttcccagtcttttctttgacctacaaggtcctactaatatcaggcttccaagttacccctatgacctcatctcctatcactcacctccctccctgggctcctgacacacatgccaggcacactcccacctcagggcttttgtacttgctgttccatctgcctgggtcgtcagagggctcactctgtcacctcctcaagtctttgctcaaacatcccttttcagtgaggacttccctggactccctagttaaaatgcctcactcctaacttccctttcttctcccgacttcgttttcccccttaggacaataaattgcttttttgcccaaaccagtttgttttccttcctttgcaaactaagcattcctatgaattatagccctcaatgaagacccaatagctgaacctccaaaggcaagggctcctcctctgaccccatcaaaggttttggcatggagctgggtgcatcggaggcccggacccaaagcaggacaacttgtcttgcttcggcaattggcacagggatgctctaagatgacagctctgtgcaggaggacagctgggccacagacaaggcggggagaagacacagattcagatgaagctggactctgccctgtccttctcatcctggccaacttaagacctgacccagcagttgggaaacatcttttccttttctcttgctaaagtccagctggggccagcctttttccaccaggccatgtgagcaagatggaaactatgacagttctggatgggctggaggctggactttatccctgccacatccctgccagccagtcaccctgacctaccacatccatgccacctgcctgccaggccattcccagagttgctctgtcctggacagcttggcagctgtgaagtgcctcacacagtgcagggaataggagatgatgtcactcaggagttcggctgaccgagcactcctggaaagatgggcagactgaggccccaccaggagaggaggtgctcaacaaaatctcgtgttcaacaaaatcatatggcttgcgacaccagagaggcctgggttttaacccagtttgtgctgattttcgaagtggtcagaactattcttacaaggtgtcaacgcacactgagtgagggcatgggtcagggttgtttgtgtgtgttgcccatttcatcctcctcacaatacagtgtaagagacattgttataacctttgattagggaaccaagacttcactgtctgtgaagtattctactctaccagctcattgcatcttcacgcaaccagggagtattacaattagtcactccattttacagatgagatgagaagatgctggatgagaagccttgaatctccaggccaaaaagggctatagagaaaactacagcacacccttctggggaatgtatgattctagctctgttcgttgtctctgagcttaatattttgcactttataaattgcagataactgatagacatacaaactttgtcttgtctgatggaactgacttccatcccctttgtggaaaaattaactctgcctccaattataattcaattcctttattccatataaatttgtgcttttttgacttgtcctttgacccagttgtaacatctgtctatttattttactctatatacatttgtacttttcttttgaatgagttataacatctgtcttgccccctcattgtttaacaagtaaactaaaatctttagtatgggttcatttttatagctgtaagagagtcacggttttaacctttttctgaaaattatcttttaacagagcctagaaatcaacgcctgattcttactgaagtagtcctggaaacaaaccctcccattcctccttgctcacctccagcactcagggcgcccttccattttgtaggtaatcctcattcagggtgctacctatcaccccttagcttacaaatgtgcaaattaaggctcaaagaggcaaagcaacttgcccaagtctacacgggaaagccaagctgtgtgtgtgtgtgtatgtgtgtgtgtcctgactgcttgaccagattgtgaattcagctccaggtagagtacaaagaatacatttggaaacagtctggtgcttgatgggggccaggtaatgctgtgattaaacagcaggttccaggggccttggcaggttgcacaatctccagggagtgagactgcagcagtactgttagtaccgttggtggtgtctttgactcctgcaaatcctaaagaacagttcaggcctaggtggtggtctctttctgtcccttcctagctctccacctaagaaaattgcccagggtcatactgcttgtaagtgaaaaagccgggatttgagcccaggaagtctgacttgcaaacttgcatgctgcagggttcaagacttggacttaaacccaagtttgttcttctcagctgtgtgaccctggaaaagttgcttaagttctctgagctacttaacttctcatttaaaagttgttatgaaaattgaattagataacatgagccaagtgccagacacatagtaaatcctcaataaataggtgctgttttccaaggcctcattatctcaaataatgagccacctcttaggggcccttatcatgagccaggtactgtgggaggcattttattgacatcatgttcagaaattctcccaacagcccttggggagacaccactataacccctatttgacaatttgataagccatttccccaaagttgcacagtgagtaagcaaagaggccgagatgtaaacccaggttccctgactccaaggcctagacacttttctacactatgcacctgctaatgtatttattcactcatcacatatttattgggcacctactatgtatgccaggctctgttctaggtgccaggactatagcagtgaaccaaacagacacaaatccctgtgctcatgaagctgatgttctggtttggggagcatcaggcagagcttctagcctttcaaggtaatactggtcacccctcccacctgcctgaccaaggtgggcaagtgcctgatggaactttggagttggagctggacatgggtggcatgggggcaaggcaaggatcaggcccaagtctgtgaaaggatggagacaaagagaagtagggggtacaggaaagagagtggcctcagaaaccgaccctctgtgcctccaaggacttgggttctctggggaccgtctctccctgaaggcaacgatccccagagctaaaatcaggtatttccaggtgtgaaggctgattgcagtgtggacagagcctgctgggggggctctggtctagggctcccctgaacctcctggtggaatgaagtcaggatggaggagagtgtgcctctccctgcgtggctgccatctgtggacatttgggtgggccagggtgccctcttgtggcctcccttgtctctgcagagactcttcatgtgtccctgtggttggaggagcttcccatgcctagatcgtttctctgttcccagcctggacccttgacccttttttctattcccagccttttctgcccctgaggtctgaaaaatggtcctcgtcatgactcttggcttttcctgtgtagatcttgaaactcagagctcagaatcccgcaagcccttagtgatgctgttggaggcatggcactgtgatgaggaggcaagcaggctgaccgcctggctcaaatcctgaccctgctgcttaggacaatggcacaacttctcccttatttttctcatttttaaagcgaagataataatagtttctaccttaaagtgttgttctgggaattaaatgagacaatatacattgagcaatttgtcaaagccccagtactaccccccgacccccaccacacacacacactcacactcacaccttttatgccttcccttagtatttcagaggcctgaaacctaacaagtgcatttttcagaatgacttgccagctgggttccaagttagatccagccactgggaggcagaggcaggggcacattattgcttctccaacagcagtggcagaatcttgagttttaggtttcagtttggcagcagcctctgcaggtccccccaccaccctacatacacacagactgccccaggatgggaggcagctgtgatcactgctggtggttttctgaagctcctgcaatgtccagactttctgaaagctggtggcagctttccccaatctttacattccaatccatccactggttcagtaagcatcatatttttcccattaaatccccttctgctggatgtcaagcaaccagggctctcattcattgttggcaggtgtggaaaatggtatgaccattttgggaacacatttggcagtttcctataaacatatactctaccataagatccagcaattctacacctaggaatttatccaagaccagtgaaatcataaggccataccaagacctgtccatgtatgtctacagcagcattactcatcaccatcccaagctggaaacaacccaaatgcccatcaataagggactggacaaactggcacatccatacaacacaatattactcaataaaaaggaaggtactgatacacacaacatggatgaagtttggacatgatgatgagtgaaaaaaggcatgaaggggtattattttatgtgtcaactatggaggggtgccaaaccttcaagaaaataattgccacacagctgtgaggagtgcagtttgctaacgtcctccggccataggaccactgggatcatgctgaagccatgctctttacgggcagcccaccgagcagagacagcactaaggcctggccatttcaatccaacagggaactctctatgatatttcttggtgctggagttctccgttgggctggctgagactttctcactaatccttattccttccttctcttcttttgtaggagccagatcagcagaaaggcctgaaggttctccccacatactcctgttcccactccccttttccttttgtgacttatccccaataaacctctaacactgctaactccatcttgacatctgcttcctggggcattgtatacatttcatttatatgaacttttaagagaggcaaaattagataccaaaaatatagatgcaaaaaacacagatcagtggttgcctggtgatatgatttggatgttttgtcccctccaaatctcctgctgaaatgtgacctccaatgctagaagcgggcatagggggaggtgtttgggtcatgggggtagattcctcatgaatggcttggtgtcctccccatggtaatgagtgagttctcactctattagttcatgtgagagctggttatttaaaggatcctggcacctcttccttgctccctccccttctctttctccatatgacatgcatgcttcccctttgccttccaccatgattgaaagcttcctaggcctcaccagaagccaagcagatactggtgtcatgctagacagcctgcagtgcctttctttagaaattacccagtcccaggtattcctttatagcaatgcaaaatggactaacacacctcagctagaggctggagagattaactgccaaggcacatgaggaaattttttggagtcatgtaaacatgctatatcttggtcatggtggttacgctggtctatacattaggcaaaactcatgaagtatacaactaaaacgggtgattttattgtatgtaaattatctcaatagagatgaatttttaaaaatcctttctttctggaaatacctagagaatacggtggttataagactgtgtgcatttgtcaaaactcagagttatacactaaaaagggggagttgtacaatctataaattatgtttttggccaggcatggtggcttacgcctgtaatcccaacactttgggaggccaaggcaggtgaatcacttgaggccaggagttcgagaccagcctggccaacatggtgaaaccccatctctactaaaaatacaaaaattagctgggcctggtggtgcgtgcctgtaatcccagttacttgggaggctgaggcaggagaatctcttgaacccaggaggcggaggttgcagtgagccgagatcgtgctactgtactccagcctgggtgatagagcaacactctgtctcaaaaaaaaatcatatatattttttcattgaagaatgaatcagggaaataataatttttactgattatcatgtggttattgctgaaaataatttcatagatgaggagggaggtgttaaaaagtgatctgcttcattgacatcctcatacttcctgatttcaaaacttactacaaagctacataatcaaaacattatggtactggcataaagacagacatatagaccaatggaacagaatagagagcccagaaatgaaccttcacatgtatggccaaatgattttcaacaaagacaccaagaccattcaatagggaaagaacagccttttcaaccaatgatgctggggaaactggatattcatataaaaagaatgaagctggacctctccttcacaccacacataaaaatgaactcaagatggatcaaagacctgaatgtaagacgtaaaaatataaaactcttggaagaaaatgtagggcaaattcttcacaacactggatttggcagtgatttcttggatgtgacatcaaaggcacaggcaacaaaaggaaaatcaggcaaattgaactttatgaaaattaaaagcttttgtgcatcaatagacactatcaacagagtaaaaggcaattcacaaaaaggcagaaaatatttacaaatcgtatatctgataagggaataatatccaaaatatacagagaacacctaaaattgaacaacaaaaacccaacaactcagttaaaaaatgggtaaaggacttgaacaaacattctcctaagtcatacaaaaggccaataagtacatcaaaagttgctcagcatccctaatcattagggaaatgcaaaccaaaattataataagataccactggctgggcatggtagctcacggctgtaatcccagcacttgggaggctgagacgggtggattgcttgagctcaggagtttaagaccagccttggcaacatggcgaaaccccatctctatttaaaaaataaaagataccacctcatactcattagaatggctaaatggctactatgaaaacaaaacaaaacaaacataaaataacaagtgttgctgagaaggtggacaaattggaacgcttgtgcactgttggtgggaatgtaaaatggtgcagcctccgtggaaaacagtgtggttaatatcactaaactgtagacctaaagtgattacgatgatcaattttatgctatgtgtattttaccacaataaaaaacttcaaaaaactaacagagttacaaaaaatatatattttattttatttttttttgagacggagtctcgctctgtcgcccaggctagagtgcagctgcatgatctcggctcactgcaagctctgtctcctgggttcacaccattctcctgcctcagctgcccgagtagctgggactacaggtgcctgccaccacggctggctaatttttttgtatttttagtagagacagggtttcaccgtgttagctaggatggtctcgatctcctgaccttgtgatccgcccgcctcccaaggtgctgggattacaggcatgagccactatgcccagcctaaaaattatcatttttttaaaaaaaagagatatctgctatgggtgtcaaatatgctaggtaccccacggacaaggggaatgggaagttgggaagtcttggatatcagctacttggtagaaacaaagaacaatattaatcatagagggcttcctggaggaggtgatacggttgggctgatgctaggccaaagaagaattacagtagtgaacgatttcgcctcagtgcccatctaggcgctgccccttggttcagttcttcatggtttccagggaggcagggagcttggaatacccacattgctgtcacttggcaaccaggaactggtggctgcagccaccagccaagttctttccatcatcctgggccctcacctctggcataggctcttggtagtgggggcccagacagggaggcacctgccacctgcttcccttctcagccacccacagccctcatagggcagaatgggactcttgctgatgtaggtaagtccacagaaagtgctggatggatcaggggcaacacacacacacacacacacacacacacacacacacacacacacacaccagccccaggagttcctcccatttgttcccatccctggaggaccctggggttcaggacaggtggaacatagtcctggccttcaggggattcacagcctagtgcaagagatagagctcacctcattctttcaatacactgatgccagtgcctattccatgctggctgctgggttacatactttcttcttcttctttttttttgttttttggtttttttgagacggcgtctcgctctgtcgcccaggttggagtgcagtggcgcgatctcagcttactgcaagctctgcctctcgggttcacgccattctcctgcctcagcctccgagtagctggaactacaggtgcccgccaccacgcccggctaattttttgtatttttagtagagacggggtttcactgtgttagccaggatggtctcgatgtcctgacctcgtgatccgcccgcctcagcctcccaaagtgctgggattacaggcgtgagccaccgcgcccggcctgggttacggactttctaaggcatggcttacccccggtcaggggtgtgggaggacagagcagatcgcactacaacaccctcatcacccttcagcagtcacctctagacgcaaagactgctttctctaaattatgcaactctgtgcctgagggccttccaggaccccagaagcagctctcagcctgtggcagatgccctcaaatgcaatagctctgagacatgccccacactgcctcccagagttcccgggtaggagtgcggtccagttgcccgtagaggtaactggcttcatcacactccctctgctggctccctttccttcctgtctcacttccctactccactgcccccaccgctatttcctggaatcagctcccaaataaaccactcaaatccctgtctcaccacgggcttctgagagaatacatgttaagacagggatgatggtgtagaagagggaaccagtgttctgtaagatgccagctacaaccaactgtatgcaaagcagtgttgaaccaaggggtgggggtgacggagctgtctgccctgtaagatgccagctacaaccaactgtatgcaaaccagtgttgaaccaaggggtgggggtgacggagctgtctgccctgtaagatgccagctacaaccaactgtatgcaaaccagtgttgaaccaaggggtgggggtgacggagctgtctgccctgtaagatgccagctacaaccaactgtatgcaaaccagtgtcaaggggtgggggtgacggacctgtctgccctgtaagatgccagctacaaccaactgtatgcaaagcagtgttgaaccaaggggtgggggtgacggagctgtctgccctgtaagatgccagctacaaccaactgtatgcaaaccagtgttgaaccaaggggtgggggtgacggagctgtctgccctgtaagatgccagctacaaccaactgtatgcaaaccagtgttgaaccaaggggtgggggtgacggagctgtctgccctgtaagatgccagctacaaccaactgtatgcaaaccagtgttgaaccaaggggtgggggtgatggagctgtctgccctgtaagatgccagctacaaccaactgtatgcaaaccagtgttgaaccaaggggtgggggtgacggagctgtctgccctgtaagatgccagctacaaccaactgtatgcaaagcagtgttgaaccacggggtgggggtgacggagctgtctgccctgtaagatgccagctacaaccaactgtatgcaaaccagtgttgaaccaaggggtgggggtgacggagctgtctgccctgtaagatgccagctacaaccaactgtatgcaaaccagtgttgaaccaaggggtgggggtgacggagctgtctgccctggtgcagacaaggagtaggtacatttgctgtagaaaacgtaaaggcagtaacaaaacagaccaaaggccagtccactttttactgtcatcatgtaccagcaatttgaatcaacttcattgataaaattctccacctgactaaggctgatagctctcactgtcccatgcccaccccttgaaagcccactgatgccaagcacactgaggaaagtgcaattaatcatgggcaaagagacgagggaaacctcactcaggaggcaacattgaccttgtaatcccacagagctagctgcattccaccatgcctttgcacatactgtttccttttactggaacaccttttgatccttaatccactttttttttttttttgagacagtctctctttatcacccaggctagagtgcagtggcttgatctcggctcactgcaacctctacctcccgggttcaagcgattctcctgcctcagcctcccgaatagctgggattacaggtgcctgccaccacgcccggctaatttttgtatttttagtagagacagggtttcaccatgttggccaggctggtcttgaactcctgacctcgtgatccacctgcctcagcctcccaaagtgctgggattacaggtgtgagccaccatgcctggccagtacttttttttttttttaaacactagacagtgagctctatagggacaggaacctgttcatctgtgtctggcccacagtaggcacttaggaatgggctgccactaagtaggcaccttaagtggacaccctgcactatggttcatggcagcccagcctatgaaagtttattgatggaatgaatctgtagaaattttccataattggataagggcattacaaacagaagggacagagcaagcaaaagcagggaagactgaaagtgcagaacttctcagtagaaagggcaaatagctttatgccacaggcagtacatctcagagaggagttccacagccactagctttagtgtcatccagaatgtagtcaacatacatgcactcttcctcagaccttctcatccagaatctctgcagaaggggttcaagaatctggttgtctcaaggaaactttaggaacacaaaatttggagaggcacagggccagctgacaaagggagtgatggactataaagaggtaagagtgccctgactgggttggggctaggccaagaattcattccttcattcagtattcattctgtctttcaataagtatagattgatcccagaaggcactcaggtacatatgtgcacaaggtagacatgctccctgttcctttgtcacagtctagtggaaagacagtcattaaataagcaaagaaataaacacctaacatagtttcaggttatgattaatgctttgcaggaaaaaaaaaaagccagagagggattaaagacgggagaaggttattttggatggaatggtctgggaagccctctgttgaggatggtaggagtgagggatgaagccacttgaaatgaagaagcaagacatgcagatatctgggaaaagagcattccaggaagaggaacgcaaaggcccaaacagaacacatgaaacagggaaactggctgggaagctactgcaatagtctaagtgtgagatgctggaggatcagaccagagtggaagcagtgaaggtgatgggaagtggtcagattcataatatattttgagagtggagtcaactagctttgctgttggaccagatgtagatgtgagagaagagggggagccaaggttattgcacgtataaaggggatgagaggacagttgaaggagactgaatcagagaggtacagggctggcagggctggggcaggagatggcagaccacatgcagattcctgcagaccatggggaggactttacttttccattgagtgtgacgattttgagccaacggatgtgatctgacttttctttttttttttttttcttttttgagacagaagatcgctctgttgcccaggctgaagtgcaatggtgcgatcttggctcactgcaacctccacctccacctcccgggttcgattgattctcatgcctcagcctcccgagtacctgggactaaaggcgtgcgccaccacacccagctaatttttgtatttttagtagagacagggtttcaccatgttggccaggctggtctcaaactcctgacctcaagtgatccgcctgcctcggcctcacaaagtgctgggattacaggcatgagccgccacacctggccgatctgacttgttttctaacagaatctctctggttgcggagtgcagtacagactagagagagacaggaatggaatggggcagttctgaggctgatgccaggcatccaagtgaaagatgacaggagcttgaaccaggttagtgactgggatggggaaactaaatttatttgggtaaaaacaataagtggatttcatgaaacttgttgaagtaacgggtggtaaaaatcataaagggggtaggcaaataaatgattgaaatttgatagtgggtcaggagcttcagctctgcgggcagcagttgtgtctccttggagaagtggtttcaactctgagccgttttgtcatctgcaaaatggggataataacggtccatacttcatagagttgttgagagggtgatgtaaaggttttagcgcacgatgtagcacacaataaacacttaataaatgttatcttagaagccagactgccaggttcccataaccatttcagccgttcaccggctggctgttgtcatcttggtcaaattatccctctgcgcctcagtttcctcatctgtgcaatgaggcacattaatcgttaatatcaactgcatagagttgggttgtgaagattaaataaatgaatacaagtaaagcgtttagaataatgtggacggtagcaagcacggcgaacgtgttaacgattattaagaatgtattttagccacatttcccagccccttccccggcctagcataccccattttgtggatgggaagtctgcctctcagcaaggtggcctcttggaggacgctgtgcccgcgtcaggcgatcctgtcgactgccgccaagacccggcttccggctttgaggggccacgccccgctcgcactccctggcggaacctttcagtgctgcgctcgcgttgccaacccggcgcgcctcacgcagttgcgcccgctgttgggactacttccggcttccccgccccgccccgtccccgggcgtctccattttggtctcaggtgtggactcggcaagaaccagcgcaagagggaagcagagttatagctaccccggccgcggagccggctcactgcactacccccgcccccttctttcctccagacgccgaagtcgcgggcgctcatggcgggcctggaggtactgttcgcatcggcagcgccggccatcacctgcaggcaggacgcgctcgtctgcttcttgcattgggaagtggtgacacacggttacttcggcttgggtgtcggtgaccaggtacgccacggagccggccagggtggaggagggaactgtcttctgcccaaactcagagtaccggaggcctggtccagagcgcccgatttccccgcttctcccagtgcagggtctggggcagatggcagcgttggtaaaacctgcgggtcggaggttgctcacctgccccatcccagcccagagtccctcacggcacagctggcacaacatgatttgtaaactcaagggcggacactcgcttcaacacagcctggcagcctctcaggccaggactgtgtggatctagcattccatagaatggcaaagaatctagacaggagtttagctccccagagcacttctcacccacctgatcccgtctgaactccttaccacccagcctcggggtgaggggactgactcagttccgccctcataccacagtagagcctccaccaaacatctggatccaagcacaggtacaggagtgagctttgacctactcagccccaggccagggcccttttttcacccgttagcatgggcccagagagttcacacgcctttcaccctttactgaagggcccagcatagtccactcgctactgccatccccaactcaagctctaggaagcaatcacccccagagtcgtacacacatacaccctgggtgtgagggtcatataagattttctcctcatagttgtccccatagggccagcccctcttctcccatccccaggctccacctcttacagctagggacgtcgttgtcatccccacagagttctaggactgctggacccaacccacctcactaattctttgctctggcattcttctttctttcctgtctcttccctgtgaccctcatccccaacatccacatcatcctagacatctgcttcctgggagaagtgggcctgcctccatgcctgcccctcactgtcactgttctctcactctcagaaccaagactagccatgggaaacagaccaccccacctattgcatcttgccatgagatttcacccttcctctcctttttgactgcttcagttctcaactcctctaatcattttttttagcttctcaaatagagtcttaattctcccctcctgacatagctttagggacctctcttcaaacttgctttgtacattctgagcacttagacaagtatcccctttcccccacccctcactgctgtccctattcctctctgtctcttagaactaaagaccaagaccaccatacccctctcacactttaccccctccagcaggaatcagaacacaagaaccgtcagggatttctggctctttttttccccagacctcaattatctcactgggaccccaggtacacactcaggatccccattcccacctccaaactcacacatacttcatctctcaaatgggctctaagactagatatgaggatggaaaagaacagctagcctttcacacacacatacctggaagcaggaatcatttcaccttcccaaacacatctgtccctgacctttctctttgtgctgctcttcattccacataccttccaaatgtcttccagcatttcagaccttgggaccaggtagagacagcacccccatttcagcgtcaggcccctctttcaatgcatagttcccctaacagaaatcttgtctccccacttgtcttactccagctttttaatcttaagcagctcttcacttgccccagtcattttatttcaacttttcctagattcttcaaagaaactggtatgtgggatggtgcaggggacagtggggctgagaagaggagtaagatttgattttgacctgggatctcctccattggccctcagctccccctgccctttgtcttgtccttcagatggaacagctctgctttgcactctgtccctcctcatgtacctcactccccttacctactcctagctagctacttagactctgccacactgtcagaaccccatccacctctgctgaggaacttgttctagagggcgtgtctgatacccttctctccttgccattccacaaataaatatcaatcactgtggatctgctcctacatttcttaccctcactcatgctgtctgaatcactttgacagtttagggacatgagttcacataagtcgataccttctagctggcattaccaccttgccatacactcaaggctccaaaattttcagatgaaatgtacagaaagaatacaatctcattttaatagttttttttttttttaaaaaggtccttgaccaattccccaaggtccatctaatttttctctgttcatggtgctattcgttgagcttctgcaggccagaaaaagatgctggtttcagacatctttggggaggcccaggagcctggggaattaggtttttgtaaggcattgccacctttcctctatctaccccagcactaaatcttgcatgcccccgaaggaatgagtgtttggattgcaaactagagtgtggtgtatttttgcttctctctgccttttctccttgattgccattggggctcaggttgcacttgtccttctgtcgcttctgctgagtctactttcattcagagtggaaactggagaggcatctttcctattagtttatttaagaagaggtttaatttttcagcctggggccagccaactcagctgactcaattgtgttttccaagctcagaggatatttgtgttgcctctccagccatctgctgtttccacccttctgggggtgataagaaggagaggaaggtcccaagagtgtatgcttgactatacaagttgacagttaaatggaaagctagattgtctgctttctcttaggttttgcttcctctgttacaggggaattgtgtacataaaacttgattagaaaaccagtgcagccactggcttcaacaaaaatccaatacttgaatttggatttctttcttgaagtcagaaccactcctcacaagaactttacagctttgtcaagtggtttgggtgccaaggggataggtaagggatgacttaggtggttatcgacataagttagagaattttgttttctgttgtgggaaatctaaggattatgatgaaagagagaaaatgcccaaaatgatctgtttaagtttctttgggtgaattttagttcagaggcattggggcaaattcatggccattaaagaatgcttccagtgccaggattttgcctaagaagacaattatctttattctcttagggccagtcttgtggacctggctgggaaaaaccttctctagccatagcctgggcaatcaggagctctgaattccaagcacagccctacacctgacttgctgagaccttgggcagctctctgaccatctcaggccttagagttttcttttctttttctttttcttttcttttttttttttttttttttaatccgagatgtctcactctgtcactcaggctagagtgcagtggtgctatcttggctcactgtaacctctgcctcctgggttcaggcaattctgccccagcatcctcagtagctgggattacaggtccccgccaccatgcctggctaattttttttgtatttttagtagagacagggtttcaccatgtttgccaggctggtctcgaactcctgaatgcaagtgatctgcctgcctctgcctcccaaagggctgggattacaggcaagagccaccgcgctcagcctcaggcctttgatttttcatcagaggaagttaaaccacgtgactgtgtacttaggctactttccaactgtggctttctgggactcttgatatttgatgtcagggtttacagggcagttgcagaccatgtttggcctgatatcgccagggtctgtcctctgtttactggggaacatcaattgcactgcagttagagatatcagtttcacctgacttcagggattttctgtaactctggaagccaaaggtgatggggtggtgagcagaccaaattgtttatattccaagagagaactctggtggattgaatgctgtacatggaggatataatataaatttaaaggcgtttgccagagcaaagatgaggatgtcatcaaattcctggcttccaaagtaaacaaatccacgacactaaacactaaacatattcgggaaatttacccagtttggggtgaggggatagtttctttttcgcagaagaatggtttgattagttttacttttgtttttcctcactctcatttctatgcttcaggcctatgaatttcattgtcatccagccaggttttaaaccatgacagttgcgacatcctgaattttatttgggatctctttccccagaggatttctgagcaccaggggtgacgaaacaggagaggccagcaattctcaatgtgtggtctccccttgtccttggtgtgtgaagttttgctttgctggacctttgtcttttccattttcttcatctccggtcccactccctcccgctgtattctcatgactacagatcttcccagtccacctgccccatggtgagcaatataaatatacatccatgaaaaaagattatagcatttttttgtgctttttaaaatttttacataagtggtactggagtgtaaacctcattttttggggaacttttctttaaatcatattttttcttttatatataatactatcattagatctggtttattccttctgactgctatatagtattccactataagcatattttgcattttatctccacttttgctaccttagccaaggctataatgaagatcctttgttatgtaccctgtgcacagggtttcttctgggagtagggattttggatcataggatattggctcatctaattgcactaaaaactgtcagattgctccccgaaggggctgtgcaagtttaaatgcccaccagcagggactggaggttcccattctccccacacctacacagacatctggcaaaaaatagaaaactgggtaataacagtccgaatcatgtaacttagtgtctcattatttcagttctgcttctctgattgctagtaaaattgaataactctttagacactattagccgctctttttcttgttcatatcttttgccactttttggagttcccaattgttattgttcattttccaggcattccctttatgtagaggttattaatttctttcctttgcagccatggcaaatgtctcttcctagcctgtggctccttattaatttagtagtgtctctgtagaacagaagctttcaattatgaacagtgtcaaaggcagcattttcttttatggatcttgtttaagaaatcttccccacctagaaatcactatattatttttcctgtagaaataatttgagaactatttctcaaactttagtatggaaagtcttaggatttttaaaaaagaaaagaggaagacatcacaactcacaataaaagatgtattttacacccaccaggctgacaagcatgaaaatggcaagcattttacccctactagattggcaagcaataatagcaatgttgccaactacacggagcaacaggagctttcatacattgctagtgggagtataaatcagtaactctttagaaaacaacttgactttatcttataaattaaaagcttttcctccatgcatactgtatagaaatttatccacgtgtaccagatgtgtacaagaatgttcatagcagcattgtttataatagcaaaacaaataagctggaaatactccaaatcaccatcaacaagtagatgtataaattgcagcatagtcatacagaatgctgtgtagctgtgaatgtgaatcagctgtagttaaatgcattgacatggatacatttccaaaaactatcaaataaaaaaggcaaatgacggaagtgatgctgtgtatttaaaattcaaaaacatttgaagctatatttttatggttgcatgtatagtaatataactctaaggaaaagtaaagaaattgtttaagagtggtgattacccttgaaggggaaggagggacatttattggagtatgctacccaaggctttagcagtattgctgatgttctatttcttaagctggtggtagagacattttataattctttgttatttgtacatgtgctacattttgtgtattatgaaattataatttttgtacatcactgcagtcagttagcgtgtattcggatctgtgtttttagtcaacaccttggtaatcctattgaagttagcctaacgtccaaactttgaaaaacactacttagaacttcgcagtgttcctcaagatgactggctttattcttagcagtgggatggggaagagataattattaaaccaacactgcagattcttgacaggttccagtgctgtgtcagaaaggtagctcaatatgagggagagcgcagtagaacagaagcccagagacctgggccctagacctctctctcgctgtaggatcttgggcaagtcatttctcttgacctccacatcttcatctgtgaagtgaggtgggtaagattagcttatctcgtgaggttctttatagttctgtgttttgagttcatgatctttctcctctcaactgtggtcttcccagccgggtcccaatgataagaagtcagaactgctgccagctgggtggaacaacaataaagacctgtatgtcctccggtatgagtataaggatgggtccagaaagctccttgtgaaagccatcaccgtggagagcagcatgatcctcaatgtgctggtgagtctctgggacacgtgagtctgctgatgagatggggataggaatggctgttttgaaacccatttaacggtacgaatccagagcttcaatgttcatgtagcccttacctagtgatcccacttctggaactttatcttaaggtgagaaccctaagtatagaaaaccttcgtgcacaaaggtatccaccacctggaattaagaaggaggggctttctgtcaacaggggaatggttaaataaggtaaatctattcagtgacaagatagaagggaaaaacttaggtaaccccaatgggctacttcagttccttaaataaattgaattctttgctgccttggagcccttgcactttacatttcctatgctggaaggctcttcccctcccccatctgccactcacacagcccttcaccattccttcatcctggacaattctctttcatttttgacttcctcaaaaatttcagttctgactacccagtcctactccccaaaaaaatctaaattatgtctctttacgccatcattttattttcctgcctgacactcattgcagcttgtaattgtgtacttatttgtgctttgcttttattctgccatgggactataagtgccacaaggacagtgactttccttttgttaacttttttcttagtggtttgggtgtgaccatgtagaagtatcctgctgtatgtattatactgcactttgcttttttttcactcggtgttttggaggcaagaccttgacatggaaatacatatagatataccttatttgttttaactattatatagtttctcatagcaccataatttctttattcctttcccttttgatgaacatttagatctcgtgtcagatagggttcttggtttcaaacaacaaaaacctcttgggttagtttaagcaaaaagggtttattaaaagaaccaggatcacccaggcgcagtggctcgcacctgtaatcccagcactttgggaggctaaggcaggtggatcacttgaggtcaggagtttgagaccagcctggtcaatatggtgaaaccctgtctctactaaaaatatttttaaaccttagccgggcgtggtcgtgggtgcctgtaatcccagctacttgggaggctgaggcaggagcatcccttgaacccaagaggcagagtttgctgtgagctgagatcgtgccactgaactccagcctgggcaatagagcaagcctctgtctcaaaacaaaacaaaacaaaaagaaccaggatagctcattgaaacaggtttaaggctaggtttccagaagcagtgtcccaaatcatgccccggaaaccactgctgccaccaccactgcccagtattagatactggctgattctgtctgccctggtgcacccttctcttaagctgctgatgtgaccccctggcctctgtgctaccctcattagcaagatgtctgccccttgctgggtctgcatctccgtgttgctcacctgcagatcaaagttgatgcatcagttcaacacctcaattaccatgcctgagcccttttgcaaaagagcctgggaagtaggtgttttagtctctgccttggaaaggcaatattcctaaatcagagaagtctccaagccttaggaaggtatttcatataaacagtccttatatatgtctctgtggacatatgtgaatatttctttaggttgaagactttgttactctcccttcaccctcccactcttagccagaaatatcccagtctctcactttctattttcacccatctaggaatatggctcacagcaagtggcagacttgaccctgaacttggatgattatatcgatgcagaacacctgggtgacttccacaggtacttctaaatgatgtctcttccctgggaaaaagaagagagaactaatggcaagatatgaggaatagggtggatgtgtccagaaaattaaggaaggtgaatggaagaaccttttatttctgggcacaacttcctaattttcttttctgttttttatgtatttgaagaggagacttccataggaaatgccacatgaaacaagatggtgcagtcaagagtccacaagtgcagtggtggctgcagagtagaggtggagcccgggcaactcattcagtcagagcagactcctgggaggatgtgtgcctcattgggtccccaaccccaatctccaacttatttaaaaaaaaattattttctttagggtcgttttaggtacaagcaaaattgagcagaaagtgcagagcattcccatattacctcctgctcccatacacccacagtttacagcttccctgtgtcaatatcccatacataatgattcatttgttacaactaatgagtctacattgacacatcattattagggctcaagcttgctgttgtgcagtctgtgggttttgacaaacagatgagaatgtgtgtctatcatagtatcacacagaatagtttgactaccctaaaaatctgtgcttctcctattcttcactcccttttccctaactgctggcaaccactgatcttttgactgtctccatagttttgccttttctagagtgtcacatagttggtatcatacagtagtatgattctagaccttttcagcagatagagctaggaaaatttttccttataagtttaaattgccacctctgtttttaatataacactacaggattctttttctcttattccatacttatatctcccttctcctgtggtgagaaccctgattcccagcagcatcaatgtatttacttatttatttgatcctagaatacacacaaatattttctgaattgctacatcagtgcctaccaagaacaaacctattaagtaaagttccaaatgacttatttccagttctttttgtcttttaactatgttccacaaaagatgtaggcagagtagtgtgttccaaaggtacttagattagtgcttgtttttaaaatcagtataatgaaattatctgttttatatatagttaagctgatttatgtctgctttattccattatagggattttccccccatcttcattgacctcctcagggttttattttttattttattttatttttttgaggtggagtctagttctgtcacccaggctggagtacagtgtgactgttcaagcaattcttctgcctcagcttcccgagtaactgggattacaggtgtgcaccaccacacccagctaatttttgcgtttttttgttttgttttttgagacggagtcttgctctgtcacccaggctggagtgcagtggcgcgatctcggctcactgcaagctctacctcccgggttcacgccattctcctgcctcagcctcccgagtagctgggactacaggtgcccaccaccacgcctggcaattttttttttttgtattttagtagagatggggtttcaccatgttagccaggatggtctcgatctcctgacctcgtgatccacctgccttggcctcccaaagtgctgggattacaggcgtgagccactgcacccagccaatttttgcgtttttaatagagacagggttttgctgttggccaggctggtgtcgaactcctgacctcaagtgatgggattacaggtgtgagctaccgcacctagccaccctcagagttttagagtgagcttggcatcactataaatgcacagttatcaaaccttaaccgaacctcagaactgcccagaaaccctgttgcatttaatagtatctaatcagcaataccctctttgaacctattccagtcctcacagactttcaaaccactggcctccacattctggccactcctcatttctcctcccctcttccatgcagcttctgtgtgaggaggtcttttacatattcccctcctgcatgccaccctccagtgtatttcccacgcagcagttggaccagtctttcagacatagatcagatcatagttaacaactctggcttaaaacccttcagtgatgctgcttcacacccattacgatgggtagtatcagaataaccagaaaataaacaagcgttgtcaaggatgtggagaaattggaactcttgtgcactcttgggaatgtaaaatggtgcagccactatggaaaacaatatgacagttcttcaaaaaattaccgtataatcctgcatgtccacttccgggcatatacccaaaagaattgaaagtaggtcttgaaaagatatttgtacacccatgttcgtagaagcattattcacagtagccaaaaggtgaaagcagcttggctgtccattgataagatgaatggatgaacaaaatttggtatgtaaatacagtagaatattattcggctttaaaaaggaaggaaattctggcccgtgctacaacatggatgaaccttgaagacattatactaaattaaataagccattcacaaaaggacaaattctgtgtgattctattaaaagtacctagattagtcaaatttgtagagacagacagtggatggtggttgccagatactggggcaagaggggaataggaaggggagttagtgattaatgggtacagagtttgttttgcaaaatgaaaagagatctggagatggatggtaggtgattgcacaacagtgttaatgtacttaacagtactgaacacttaaaaatggttaagatggtaaattttatgcatattttaccacagttaaaagtctttagggaatactcattgctgttaggataaagagcacaatccttgatgaggccttaaagcattcaccccttcaatctcaccttgtactgccttccccgcatccctgtgcttcagccacagtgtcattcttctgccctcttcagacctcttccctctgtctaaagtgctctccctgacctcacgtagccaactcctgtttatcttttggttaccgatttaaacgtcagttccttagagaagcttcctctggcccccaggcttacagcttcaaaacattttagtaaaatgttttttttggagtcaggtttccctctgttgcccaggcaggctggagtacagtggcacaatcagctcacttataaacaggccaagcagcctcaacctactgggctcaagtgaccctcccacctgagcctcccaaataattgggtctacaggcatgtgccaccatgcccagccagttttttattttttgtagagatgaggtctttgctgtgttgccctggatcaaaacatcattttttaagcatttaatccatcagatattttacatttaccttcttagggttggtcttccctccttgcctgtgatctccttgagggcagggtttgggtgtcttctgcatgcaatagacaaagggagggaaggggaagtgagccaggcctggccggcagaatgctgcgcctctgaggaaagggggaagtgagccaggcctggccggcagaatgccgcgcctctgggtgttgcacactccctgacaccctggcccctcttagtgggtaagggagggacatttggagtgtggtctcttgacttcttcactctggacttccactgggagagaaattgacaaaacctgtggaagaacctaggaattatactggccattcatgctcattagagcattccgtctgttcagcaatactgaaagagaattgtgatcctgtctctatttgttttttaagtacatttgtttgaggggtttgtgtgtgagggaggggatatgtgttgtgttttgttttgttttttgattactgtgaaatgagggacacaatagtactacctcagggtttttctgagaatggaatgagatgtcagcacatagagtgcttagcgcttagtccagctcttagtaaaatacacaaaggggaaaaaaatgtgatcaccaggagtcatctccgtggaaatgggcggtgaaagctgaggtatggctctgcctcctgatcagaggccctgtctccctcctatgcctttcagccatagcttcctccatgtagccctctttattaggtcattgtggcatgtcttgcctcttccagcaatttgtgctcctcagtgagcaaactgtgatttgctaagaaatataaacctattgtgttccattctgctgtaccctttctgtgtcggatgagatggtaggctgtcttttgccacaaccaaaatggcagttgttctttcaaggcttagaaattgtgtgagaacttctccttcaggacctggtggttttttaatcaggcctgaattttacacatgcctagggagatcagaggcctccctctgatctgattaaaaggaaagaagacttgaatttaccctcccacccagcttgggcaggcaagcagctcattttttacccatggatgtccaatggccccaacatcatttgttattccttcattgaattacttttgaaactttgtcaaaaatcagttgtctgtacatctgtggatctatctctggatcccttgttcttttccattgatctctatgtctcttcctctgtcaatattactctatcagtattgattattgtaggccttaatattgagtagaataattcctcccactttttcttcgtcaaggtagttgtagctattctaggttctgtgccttttcttttttttcttttttctttctttttttttttctttgtttgagacagagtctcactgtgtctcaaaaaggctcaggctggagtgcagtggtgtgatcttggctcacttcaacctctgcctccggggttcaagtgattctcctgcctcaaccttctgagtagctgggactacagatgcgtgccaccatgcctggctaattttttgtatttttagtagagacggggttttaccatgttagccaggatggtctcgatctcctgacctcgtgacccacccatcttagcctcccaaagtgctgggattacagacgtgagccaccgcacctggcctctgtgccttttcatataaactttagagtaagcttgtgtatatctatgaaaaaccttgctaggattttgataggagttgcattaaacctatagattagtttggggagaattgacattcttgctatgaacatgatatatcttatctctccatttattaatatttaggttttatttgatttccatcagtatcatttgtaattttcaacatatagatcctgtacatagcttgttatttgtttaaagcagaaagggagatgattatgaatggcatattctgtcctttgttttggttttcaaatgttcattgttagtgtgtagaaatgtagttgattttcctgtgttgaactcttctatcctgtcaccttgctgaattcaaggtgtttagggtttttttgtttttttttttttttggtagattccttgggaatttcagggtagactatcatgtcatttgcaaatagggacagttttattccttacttgctaatatgaatgccttttgtttttcttgccttattgcagtggtcaggatgtccaatattatgttaaataagagtgatgagaaagaatatgctttcctcgttcccaatcttaggagcaaagcattcagtctttcacagtaaagtatattgttaggggtaggttttttgtaaatgttctttatcaggttaaagaagttcccctttattcttagtttgttgagagtttttaatcttgaatggatttatcatgttggattttgtcaaaagcttttttctgtatcaattgatatgatcatatgatttttcttccatagcttattgatatggtagattacgttgattgatttgtgactattaaccagtcttgcatgcctagaacaaatcatacttggtcatggcatatagttctttttatacatttttaaattcaatttgctcatattttgttgaggattttttttgtgtgtaagttcataggatatactagtctatatatgtgtatatatatatatattttttttttttttttggtgtagtctttgcctggttttgataccagagtaatactggtctcatgaaatggattggaacgtattccctcctcatatattttctagaagtgactgtaaaattggtgttaattcttctttgaatgtttggtagaattcttcctgaaatcatctgagcctggagatttttggtttttgtttttttattttatttttttagaatgttaagtgtaattcagtttctttaatggaactattcagattatctatttcattttggctgagttgtagtttatggtttttaagaattggtctattctgagttgttggattaagttgttcttagtattctcttattatcctttcagtggctacagatctattgtaatatctcctgtttcgttcttgttattggtgactgtgtcctctctttgtatttgtcagtctcgccaggagttggtcagttttattctttttttttgaagaattgactttgtttcattttctctcttgtttttcttttttattgacttctgttcttacctttattacttctgcttgctttgagttaatttgctcttctttttctaggttctttaggtcagaattttggttattgatttgaattccttcctctattttgatgtaagcatttagtgctatgaggtttcttctcagcaatcctttagttatatcccacatattttcgtatgtttttattttcattttaattcagtgctatatatttcttttttgtgactttgatccaaggattttctagaagtatgttgcttaattttcatgtatttagagagttaactttttgttttgatttctgttatgattccatatggttggagaacatactttatatgatttcagttattttacatttgtgagctttgctttatgggccaggatgtggttcattttaaaataccagtgttttaggaagcctggagtcctgcccactctgttacctcagcctgcctccacacctcagctgtggctcacgtcacttgtctctcacaggcatagaaaaagaggcccaggcaggatgggacaggtggtaggggcagccttccgaggacccctgagttagtgacagaactggaccttgaacccccagagctctgcctgcctggaacaggaacctggttcatcctccccatggagcctttgccttccatgacccttcccatgacacgtgatgaacacacaatgaagctgagggaggggtgaggcgggtgaggacagaggagtagccaatccaggccctgtgcccctacaccctcacctctttctaatggggtggtaaacaaggaggggcaactcagatgcctaagaagcttgggcccaaatctcagagacagcgtggggctgttgcccccctcacccaggtccagcaggcggcctgttcccccacttataaacaggccaagcgcaatgccaggagctatcagggccgccgccgccgccgtcgttgcagccagaataccacttccagggttcctagccaactgcaagcagttgactcttcatctgcttcctgcaggacctacaagaacagtgaggagcttcggtctcgtattgtgtctggaatcatcacacctatccatgagcagtgggaaaaggctaatgtaagcagtccccaccgggagttcccccctgctaccgccagagaggtggacccactccggattcctccacaccacccacacaccagtcggcagcctccctggtgagtacagagtgcctagcgggaagcccatgcttctgtagagggattccagccagctatccccatcctgccacttgaccccatccctggcccgtatgtgttttcaacaaaatgatcagtgtcttggggtgcatggagttagaaagtggagacgtaagtggagcagtgagttcttgaactgctactagtcaccctaattacccaaaatcctaagcctgcctgatttctttctaggggccacacagagcccctgagtctgtccaaggatcagtgcctctggggcttatgtgcagtagtctaaggttgctgcccaggtaattcacagctaattcattccagagctttttgtctagacagggccctgggccagtctttctgagaaaatgtaaacatgtagaggtactagcccagaggagatgcagtcccagtgtcttgcccatttcatttcattgtagtcccccaatctcactatcaagttcagaagttttccaaaatagcatgggatgtgagtgagtcacattccaaggtttttgcagattaggatggcagcattaggactggagacttctgctcagagggaggagacaaggaccaggggaccctagtctctagctgagacagcacttctcagtttggagcccgtactgtgataccatactgttggtagggataagggacagagttcactgtgagggacatgaataagcacttaataaatgtagactaccattgttattttattctggtttgcaattatatgcctttagttagctaaaaatgggaaatcagtttaattattccaagtaatgattggcgtatctctttggcaaaatctttaccaaaaatattgagtcctgtgaagagaatggagaataagaaaaagtggttgaaaaggttgaaaatggcttgtctgatatatcttattttaccaaagggaatagagataagatgacctgcctgagttcgccagccactaataaagaggcagagccagggctggggtctaggtgtccttactccctgcacagtgctctggctgtgatgtaaacagatgtgatctaaccacctttccatggtggaaagatttaagaataagccctggtcagaagtcaagttgggaaaaaattttagacctaaagtaaatagtaattctcagctttattagacccaatgcccatttcaaaacaagtattctgtgaaatatcccttactatattgaaatggaattcataggtattctaacttacctcatgcacatttcagaggaaatcagtataaagtcctaactataacataaattagaaaaagagagtaattgataagatgatgatgtgtattccatgcgtaggtgcctgagtacactggagagcatggatgtttacacctgtatgtggaattatcttgaattcaacagtgacaaaggctgttgtatatagatgtattatgtcaacaactcaaataccacaaaactctgttgctgttactaacatgacttttttgaaatggtaaacagctgttaggagaattgcaaacaaaatagtgattgaatattgtttcttcagttataccatagttacattcctggaaaaatgtgcttgttttaaagtagtagaaaaaaatacttagtgttcatatataaaatggccttacattcagataatttatttaggctttacacctccatgagtatctaacaagacatttgaaaattgtgtgggatgcaggtcattcttcatttcgtgaaactctactatgaattgtagaacatccagcatctctggtctctgcctgtaaatgccaagaacgccctccaactactatgacaagcaaaaatgaccccagggcttgcactatggcacctggaggctatgcttccctatttgggaatcatagacgtagagtatagaattgtgaaagtaaaaatcctagccttggaagaactgagagaatgagaaaatcaccatgttgcaacttctgctgaaataatgtacctagtcacaaattgtcaatggttgataaaactattaagtaaaggtcgataggggactttatattaggtggatctggcgagtagcatctgaacccattggttaatcttaacgctaaaagtgggatagccagatactgttttctaatattatgcaatagtaagttcacagcaacctcaatctagatctaactcccagtttaaaaatatgaaggacagaagaatgagtcaaacaggtgcatgaggatacaacatccaaaattggaatatggaaaaattatataggataaattgaccttgttttttcaacaaataaattaatcgcatggggagaaaagggagaaaaggaggctcttgtggaaagagtcataccaactaaaatgcagtgttggaccttgtttggatcttgattcaaactaattcaaaaaattatttttcaaacatttggggaaatttgagcattgaccaggtattagatagcattatgaattactgccagttttgttaggtgaaataattctgcttatgttaaaaaaagtctttatctgttagagatatacattgaagtatttaaaggtgaatgatatgtctgggatttactttaaaataatttcagcccccgccaaaagagtaaggtgttggggaggggaagtataagtaaaataagaatggtggactattgataattattgaagttaggcgggaatacacacaggaactcatgatactattcttactattttttggtatgttaaaaaatttccttaataaggagtttttattaataccagttcttcacatagtcctccaaaaaatagaagaggagggaatacttcccagcttcttctgtgaagctagtattatcctgataaccagtaccaaagacatgacaagaaaactacaagccagtatcctttatgaatacagatatgaaaacccttaacaaagtactaacaaaccaaatccagcaacatatacaaaggattatataacatgaccaagtgaaattgattccaggaatgattgatttaacatctgaaaataaatcagtgttaagataccatatcaatagaacaaaggaggccaggcgcccggtggctcatgcctgtaatccctgcatttgggaggctgaggcacaggaatcgcttgaacccgggaggtggaggttgtagggagctgagatggcgccactgcactccagcctgggcaacagagactgcatctcaaaaaaaaaaaaaaaaaatacaacaaaggataaaaactacatgttcatctcgatagaaaaatagcatttgacaaagtctgacaccctttcatgacaggagcattcagttagcctgggaaatatagtgagaccctgtctttacaaaaaaaattaaaaattagccaggcttgatggcatatacctatagtcccagctacttagggtgctgaggtgaaagggtcacttcaacctgggaggtcaaggctgcagtgagctgtcatcacaccactgcactccagcctgggcaacaaagtgagaccctgtctcaaaaacaaacaaaaaaaaacaaaaccaaacaaaagcaaataaaaaaacaacaaattcagcaataggaggggccaggcatggtggttcacccctgtaatcccagcactttgggaggccaaggcaggtggattatttgaggtcgggagttcaagatcagcctggccaacatggtgaaaccctgtctctactaaaaatatataaataatctgggcatggttgtgcatgcctgtaatcccagctactcggtaggctgaggcagaatcgcttgaacctgggaggtggaggttgcagtgagccgagatcacgccactgcactctagcctggacaacagagcgagactgtgtcagaaaacacacatacgaaaagaacaacaacaaaaaacaacaatagaagggaattttctaaagccaataaagagcatctacaaaaagctcacagctgacattctccttaatggagaaagatggagtgttttcctcttaagatccggaacaaggcaagcatgtttgcttttgtttttgccacttttatataacattgtacttgatattctagccagggcaatcactcaagaaaaataaggggtatccagattagaaagtaggaagtaaaaatacctctatttgtcaatgacgtgatatcttgtatacagaaaatcctaaggaatcctccgaaaaacagaactaagcaagttcagcaatgtggcaggatataaaattgatatcctggctaacacggtgaaaccccgtctctactaaaaatacaaaaaattagctgggtgtggtggcaggtgcttgtagtcccagctactcaggaggctgaggcaggagaacggcgtgaacccgggaggcagagcttgcagtgagctgagattgcaccactgcactccagcctgggcaacagagcgagactccatctcaaaaaaaaaaaaacgataaaaatcagttgtatttctgtacattagcaatgaacaatctaaaaattaatgaaattatcccatttataacaacccccaaaagaatataatacgtaaaaataaatttaacaaaagaagaattgtgaaagatttgggaaagaattgtgtaagatttgtacagtgaaaactgtaaaacattgttgaaagaaattaaagatttaagtaaaggaaagacattctgtgctcacggctaggaagaattaatattagccatactccccacttgatctacctattcagtgcgatcccagtgaaaatcccagcaggttttgggtttttcccccccagaaattggcaagctgatcctaaaattcaggtagaaatgcaagggaaccagaatggctaaaacaatctcaaagaaaaacaaagttgaaagacttccagatccctatttcaaaacttattacaaagcttcaatcatcaggaccgtgtggcactggcattaggataaacatatagagcaaggaaatagaattgagagtctagaaattaacccatacattcatagggaattgatttcagcaaggttgccaagacaatttagtagagaaaccatagtcttttcaaatggtgctgggacaattggatatctacatgcaaaagaatgaagttgggtcccttcctcgattacctctaaatgaatcacacacctgagtgtaagagcttgaactataaaatttctagacctagaaataagtctaccttgggtagtcttattccctgaccttcagttagactgtggtttcttagacacaatacctgggaggttaaaagcacaagcagcgagaaaaaatagacaaatcaaactttgtcaaaattaaaatattttgtgcataaaaggatagtatcaagaaactgaaaagataacccaaagaatgggagagaatatttgcaaatcagatatctgacaagaagcttgtatccagaatatataaagagctcttacgactgaacaatacaaaagaaaactcaattttaaaatgttcaaaggatttgagtagatatttctccaaggaggatgtacagatagtccatgagcacaagaaaaggtgtgcaacaacattggtcattagggaaatggaaatccaaaccaagaaatagtattatttgcaatagccaaaaagtaagaacaacctaaatgtctatcatttgatgaatagcaaatatgatatatgcttacaactgaatatggatattacagcaataaaaatgaaggatttgttataatgtggatgaacctttaaaacatcacgttaagtgaaagaagccagtcataaaagactatatatgatttatttatgtgaaatgtccagaataggcaactttatagagatagaaagcagattaatggttgccagggtggaggtggaagatgggaaagcaggaatgaggagagactgctaatgggtaccaggtttctttttggggtgaagaaaatgttctgaaattagaacatttgcatattctgtgaacatctaaaaaccatgcgttatacatgttagctggttgaattttataagtgaaatgtatctcaataaagctataaaaaatgggtattttacaaaagtcctagacttgggttaattggaaacatgaatatataatgatagaaattatttccttcagatcaaaccatagtccaagagaattgataataactgcccatgactggggctttttttttctttttaatattttttcttcagctgaagagtggtttgttagtacctaaacaatattttaaggactcatcatcataccagcaaacgtgatttatttaaaattagctactgaatgccttccccctaaggaagaaggcaaggataaccgctctgaccactcttattcagcataatactagaagttttagcccgcacattaaaacaagaaaaagaattatcatacagataaggaaggaagaaataaaccagtttatatatgcagatgacataatgatctacatagaaaatcccaaggaatctaccaaaaataataataaaaataagtttgaccaggttgccagataccagattaacatacaaaagttaattgtatttttatatactagcaataaacacgtggaacgaaatttaaaatacagtactgtttatagttgttcaacaactactcagataggctgggcacaatggctcacgcctgtaatcccagcactttggaggccgaagagggcagattacctgaggtcaggagttcgagaccagcctggccaaccaacatggtgaaaccccgtctctactaaaaatagaaaaattagccaggtgtggtggcgcacgcctgtaatcccagctactcgggaggctgaggtgggagaattgcttgaacccaggaggcagaggttgcagtgagctgagatcgcgccacaccactgcactccagcctgaacgacagagcgagactccttcccaaaacaaaacaaaacaaaaactaaaataactcagctataattcttttttttttattgttatacttcaagttttagggtacacgtgcacaacgtgcaggttagttacatatgtatacatgtgccatgttggtgtgctgcacccattaactcatcattcaacattaggtatttctcctaatgctatccctccctcctccccccaccccacaacaggccccggtgtgtgatgttccccttcctgtgtccaagtgttctcattgttcaattcccacctatgagtgagaacatgcagtgtttggttttttgcccttgcaatagtttgctgagaatggtggtttccagcttcatccatgtccctacaaaggacgtgaactcatcattttttatggctacatagtactccatggtgtatatgtgccacattttcttaatccagtctatcattgttggacatttgggttggttccgagtctttgctattgtgaatagtgccgcaataaacatatatgtgcatgtgtctttatagcagcatgttttataatcctttgggtatatacccagtaatgggatggctgggtcaaatggtatttctagttctagatccctgaggaatcgccacactgacttccacaatggttgaactagtttacagtcccaccaacagtgtaaaagtgttcctatttctccacatcctctccagcaggtataattctaacaaaacttgtataagatttttatactgaaaactacaaaatgctagtgaaagaaatcaaagaagatctaaataaatggagagacataacatattcatggattaaaaaatcagcatagtaaaaatgtcagatactccacaaattgatacactattttaatgcaattcctatcaaaaatcccaacaagaatttctgcagatatagcaagatacagcagataatatttatatggaaaggcaaagaatctaagatagctataacaattttttaaaagaataaagtagaagaaatcattctacccaatattagggctaattatatagctaaagtaatcaagatggtggaattggcagagggacagacatatagataagtagaacagaatagtgaacacagaactaagaccagccaacttttgacaagggtgcaaaaacaagtcaatggaggaaagaatgtctttcagtagatgatgctggagcaattggataatcacaagcaaaaatatgacccttgaccttaaccttctataaaaatgacctcaaagtggatcattgatttaaatgtaacatacaataccacagcactcctagaagaaaacacaagaggaaatcttcagtgtctcaggcttggtgaagagttcttagatacagcactaaatgcacagtgtttaaaaagatgctaaattggacttcattgaaatttaaaacttttgctctgtgaaagaccctgttaagaggatagaagcataacctacagtttgggaggcaatgcttggaaaccatatattcaacaaaggattcatatctagataaagaactctcaaaatcaacagcttaagaaactatccaattagaaaatggaaaaatgaaggccaggcatggtggctcatgcctgtaatcccagtactttgggaagctgaggtggttggatcacctgaggccaggaattcgagatcagcctggccaacatggtgaaaccgtgtctcttcaaaaatactaaaattagcgggtgtggtggtgcatgcctgtagtcccagctactcgggaggctgaggcagaggatcacttgaacccgggaggcggaggttgcagtgagccgagatggcaccactgctctccagcctgggtgacagagcaagactccgtcccccccaaaaaaagaaaaaaatggaaaaatgatatgaagaggtagtacactgagaaggatgtacagatggcaaagaagcaatgaaaagatgctcagcattgttagccattaagctaggtgaaatgcaaatgaaaccacaatgggagtttcacacctattagaatagccaaaattaaaaatagtgatgatactaaattctagagagagtgcagaaaaactggatcatgtacactgctggtgggcatgtcaaatgttacagctactctggaaaatcatttggcagtttcttaaaaaactaaacgtgtacataatagttagctccaggaatcacactcctgaacatttatctcagaaaaatgaaaattgtgcccacagaaaaacctgtacacagatgttcagaagagttttatttgtaatagccaaaagctggaaataatctgatgtgcctcctccagtgatgaatagttaaaggaaccgtggtttatccatactgtggaataccactcggcagcataaaggaatgaattgttgaaacacagcaatttggttaatcagagttattatgctgagtgaaagaagccattcccaaaaggtcacatattgtgtgattccacttacataacatttttaaaatgacacagttatagaggcgctaaacagattagtggttgccaggggttatgagggcagggctgtaggtgtggttattaaggggagtagcatgagagagatctttgtggtggtttaactattagaggaaactgagtgaagtatattggaacctcttgtgctgtttttccaacccccgtgaatctttttttttctttttagacagagtcacccagtgtggagtgcagtggtgcgatctcggctcactgcagcctccgcctcccgggttcaagcaactcttctgcctcagctttctgagtagctgggattacagatgcctgccaccacacccagctcatttttgtatttttagtagagacgaggtttcaccatgtcgggcaggctggtctcaaaatcctgccctcaagtgatctgcccacctcagcctctcaaagggctgggatcataggcataagcccctgttcctgggcccctgtgaatctttaattatttaacaataaaagggtttttaaaatttagatgctgaagagccacttagattcttaagtccatggtatttattcagttctgtgtagggggacagtggatctagccctgagtgtttcataaaggccagtgaggccttttgtcctgctcgctcatacctagtcagggatgagcaatggactgggagcacataggaaaaggaatctgagccttacctgaaggcttccccaaggaagggactgaccactaagcaggctcctaaagaataaggaggagatgttagccagacagagagtagggcagaaagggcatcttagcctgaaagcctgtcctgtgcagagccctggaaggacaggcagtggagctagagccaggcaggggtcgttaagtgggttgctgagaccaggtcaagcttccccacttagggtaagggaaaggatacaatactccttatcagggtagaaaattaccaagaagtgatgtgggcctcagttcagtgaatctttactaagtgaaggctctgagtctttggtctgaggaggctttggggaacatgtggatattctactaggcccagaaaatgagaaggataccagccaagcactggactgctgcaggtccagcaagtcctgccccaacctggttttggttggcagaaacctctggtcctctatctctggagtttaccccacttctgacagtaccaccactcagttatttttgtctgatgccaagattactggcttttttcaagcgcatattttctttgctctgtgttttcacccattgcttggacctgtgcattgtacatttttggtgagtcctctattcagcaaatgtttttctctgtgggttcagggatcctagggttgggcccctgctttagaggcatgcacttcccctgtggcatgggaaataggtgagttagagagataattgctgttacagaggttagcacagagatacttcatgagtatcctgggaaaggctacttggaagtgctgcctgagttgtgtcttcaccggaaagggaattatttcttaaactctctttctgccttttcatgtgtctgaattactacgtaacagatttttttttttttttagggagaaggttgttccaggctgaggaaacagtaggttagaggcatcaaggtctaaaaacatggggctgtccctgaactttagctggacaaaaatgatttgtctggaatcctagcatataccagctgtggagggtggggccagatttggggaagcccctgatgtgaagtacacgaatctccctgtggacagttggaaaccactgaaggattctgagggcaacagtgcctttggctaaagagcctggtgggttggagaggatcaggcagaagattgagcttgtccctcctccatatcgctctgaaggaaggacttggttcccttccttccctgccccacctctccccccacgtcaaggagagtattttgcggcaattaggaacacaggctttgaagaatgatcagctgggttcataccctgagcttacacctttccctgtctcagcacatttagcctcttgaagcctcagttttctgatctgcaccttgggaataattatagctgtgtcaaaggttttgtaggattgaatgtgatcgtggatatcacatgttgacattcagtaaatattcagtggtctagtaactggtcactggaaaaaaatattcagtggatgcccattcaggtagctggcaaagatgagaacaaatgtgaaggtgtaatgagtagagggtctctcaagagagaaccttgttttattttttttaaatacctaccatcttccccccaaaacagatttgatggaggattaggtgtgagagtgtcagcccagagcgggtgttgggcaagtatttaggcccaggcccaggtccattatggacattgtttccgttatcatcatcatcatcatcatcatcatcatcatcatcatcatcaccaccctgtgttgaggacagaagtaatttccctttcttggctgttcaccatgcgttggcctgtgaaccgagtgtgttaatttatggttgcttatcttctggacagccctacaagaagatcagtggcatccccactttacaggggaagagacagtggctgagggaggtaacgtagcttctcagcgttatctcgctgggagggtgagcactgggatttaccccgaagtgggtctaactcagcagcttatgcttttcccactgcacctgtcagcgttagttcatgtaataagcaatgtggtgtacaaattcaatgtagtgtagactgattatggagaagcccatcccctttctcctcctcaattaagtctttctgaggcagatctatttcacaagagtaaggcactgaactggagagatggttggaagaggaggcagaatgtttaggaggctttttcttagcctctagcaaattgacagcctatcagatctcccctctgtaatcacctcacctgcctctgcccccactccctgcttattccttggccagccccatttgtccatgagctcagatagctgtgttgaccctgatttctttactatagctcccatcaccaccactttgctcagcaaccaggcactcacacttccaccttttcctttctccctgaaatgcccagttttggggggaggccacagcaggaaggaggcaaaaagcagcacagaagctggcctctctggctgctgcagagtattaattatcccatcactgaacacccttggctggcgctcggagcagaaatatcagcctctgctccttcccataggacacagtccagtgtctcacccctcaccttaaacactcttgttttgcctctctcacacctggaaatttccaaatacaaactaaagttggaattgtctgccctagagcgtaaagagacttgtttccctgtgtgtgtagtgatgtatggctgcagcttgtcaaaagattctgggtctgctgtgatactgggtgcgtctaggctaggagtatagctagagaggacattccattgtagtggaagattggaggtgggcaggtcttttctactcctgagaagtctaggaaagaattactgaaaacaaccatctgtaaggaaaatatttttttatccagcctaacttttcattatcattataagtctaacctatttccttttgcttcatctgtcctctgatagtcaggagactgtatgccccaaatcctgctccatgttttgtaaaaaacagttttttctatgcttaaccagcttctctaaaaataaatctttagatataaagctcttatttatgtcattctgaattcatttttaatcccaaccaatctgtatctttacatatttttaaatgttccaaatagtttgcattttgcattttctttttaaatttcataatccatttactaaagtgccaaacataactcttttagtatctgatatttcattttgctagtatgctatggtttatataacttctatggggtatgtcaagcatttctaatttgtgattaatacagctatgaacatccctgtgtattaggtttttttttcttttacttccttgagttatattacttacactggaggacctcaaactttatgttctcaggaaccctctagcactctcaaaaattattgaggaccccagagagctcttatatgggttatatgtagcaatatttactgcattagcagttacaaatgatattttcaaaatacacatttattcattcatttaaaaataagcccattatgtgttaatataaataacaaattcctgtgaaaatatctcttcaaaacaaaaaatttagtgagaagagtaacattcttttacattttgcaaatctctttaatgtctggcttaatggaagacaactagattctcatttctgcttctgcattcagtctgtaggggatatgttgttttcattgaagcctttcacatatcagttgttggaaaaaaagaggactagtttaataaccttttcaaataattctagatattctttactgttaaaccaacttgacgagtagtagtttttgtaagggttagttgtaatgtggaatcaatccataccagtgaacttgttatatatctgttacatcaaaatctgctggtctatcatgccatttgaatggaccttttacccgtgtataatactattgtagaagatcgtgtattttggtcatttggaaaatactgattcactgagatatgcagatctgctcaaagttgacacatcttattatacaatatcattgctaatttttgcttgaaaacttgaattttctcattggcagtaaatagcattcattattttccttgaagtaatgggctcacatccttttcgagaaaatgtccgctatgtagccaagttgaataagcatggtttgtcattctttcaagtaaaaacaaaaaacaaaaaactgttttctttgaaaaaatgactgcttcagccagcagcttgaacaactgcacaagtacttttcatcatgacaacattgtgcctctgtgtgcagtagaagtgctttatgcaaggccaggtgtggtggcccacacctgtaatcccagcacttcaggagactgagacaagtgaattgcttgagcctagaagtttgagaccagcctgggcaacatggtgaaactctgtctctataaattagctggatgtggtggcgtgaccctggagtcccaactacttgagaggctgaggtgggaggattgcttgagcccaggaggtggaggttgtggtgagccatgatcacaccactgtactccagcctgggcaacatggtgaaactctgtctctataaattagctggatgtggtggtgtgaccctggagtcccaactacttgagaggctgaggtgggaggattgcttgagcccaggaggtggaggttgtggtgagccatgatcacactactgtactccagcctgggcaacagagcaagaccctgtctcaaaaaaaaaaaaaaaagtgctttatgcccgtttcccacttcacgcagaatattaaaaagacatattcaaagattgaaattttacaaaacttgacaatctatacctcttcatcaagtacattctaaagtgaagctggatgtgggtgagtgagtggtaagggagggtgcaataacggccaggttagtgctgctgctttgagtcatactatggcatcagcagttccacccactgttgcttttgcaccgtcagtgcaaatgtcaacacagcaaaaaaaaagcaaatagcttctgagatagaatagttttgacctcatgggacaggagtccatgagccacattaaaattttttttttctcgaagtttactagccatttggatttcatcttttgtgaagaggtaatcaaatctcttgttcatttttctattggcttgtctttttatgacttgttggcattgtttatataatatattctgaatttaagtccttcattaaatatatgtattacaaatgtcttcctcccctctgtagcttgcccttttaccctattaatggttttttttaattattgttaaagcattcctaatttttatgtaatctagcttatcagtgcttttccctttatgtttggtgctcttttgatttttgtttaagaagtctttgccttatgccaaggtcatggagaaatcctcatatattttctcctagaagctttaatggtttaccttttatgtttagatctataatccatctaaaatattttttatgtgtggtgtgagatttatatttttccacattgatatccagttggtctagcaccatattttgaaaagattatcctctacctatgttactttaataatttaattttcatttttcattacttgtgcaactattctctattcttaaaatttgttttcattcctttcgccttggagtcacataatatccctttggttttttcctgtggatagcaaagttcaataacatttatacagctactgtttattcagtgccattgattctagacaaatgctgggcatttaatccatgtgctcttatttaatcccctcaacaattccatgagattggtaagggctatccccattttgcaggtaaggaagctgaagttcatgtacagtaagtaacttcacaacagtaagaagcaaaagttgtgttataatagtaaattattgaattctacttatgggactcaggcactacacttttgtaagcattctcatttaatatgtataacaaccctgtgaaatagatactattgtctgtattttacacaagagaaagctagagcttggagattttctaacttgccctgggtcacacatctgtgaaatggtgaggccagaatttggacttgagtcttatgcccaaatcaatctaagtgtccatcatgtgccacttactgggaatatgtcatgaggtgtggacccagccttcaaggagctcacagttgataggggctaattgcccttttcattccagatcataaatctttttaaaacaatggtagaagtatgtctgagatctgctgaagcacattaaagagtgattaatctgaaggatagaaggaaagttttcagagagatgatgcctgatgagctaaattttaaaggaccaataaaagttctgtggtattgagggtaattgacttttatggcagagggaacgatgggtaccagtggggctatgaaatcatcttgtagaagtgggggagtttttgtttcactcatgtcagcatgtgaagggagaaaagatgaacatgagggccaaatcacaaggccagtatgtgctaagaagctggatttgatccatggggtgatgggagccatcaatgttttgaaaagttacgtggttgggactcggttaaccacggatttttttttttcctcttgaagaatcccagtcatattctgacagtggacgtgttaacatggttaatatttattgagcttttactgtgggctgagcagttacattaaatgtaaagtatatgtaaaacaatatcttttaagcctcataagagaatgaggtagatgctcttggtatctctgttttatgcaaaagaaaactgaggcagcaagagcttgacttgcccaaagcaacacatcttatgagcattggagcaggattcagcccttagtatttccaacttttgacacatgtattggcagttgtttcagaagaaatgagtttggcttggattgctccaagaacaaagaaatgaacttggcttggattgctccaaatactggtttgaacacagtacagcagtggagcagaaacagaggagatgacaccatggggtaagcacagtccgatgcatataacccatggggccaagatcaggagaatgggaagccactggacaggttttacaagggagggacttcatattgtttacattaaaaaacaaaataaccctctggctcctttgtagagatggattatagagggacaagagtaaaaacagacccagagaagaagctgacacaggcagccaggcaagaaataatggtggtaggtggtagactatggtggtatataaggcaggtggctctggggtatatttggaagtatacctgacaggacttgctgatgggttggcttaatgaagggaagaaaactcaaggacaatgcaagttctttttttagcctgtcatttctgatttgggactgccataactaatgcttcagtagacatacttttatgcaacttggagcacgtctctgaatgtttccttagaatagattcctatagaattactacattaaggaccaagcctgtttatagagattttgatacagattgctcagttgccctttttctaaacagttgtgttaattgacattctcactatgtttcaatgtcatttccctatccttaccaatgctggagtcagtctcattattcttctaaattacttagaaaaacattgtcttcataacatctgtaagctaactgaactcaaagtgtaaggccagtaaagtgaggaaagtgtttgcagcatatgtgtgcatcataaattgccacaaatgagtagcttaaaactgcacccacttattatctcataattctctaggtcaagagtatggatttgcttggctcattcaggtcactggcagaattcagttccttgcggttataagactaaggtccgtatccctctccctcagctccataagaccttctgcatttcttctcatgtgtctgccacctcttcaaagccagcagtgctgtgttgagtctcttcttgggcattcttcttcctccacaatccatgttctgtgcttttaagggttcccatgtattagattagcccaccgagataatgtccccttttgaggtcaactgtgccatacaacgaaacaataataggattgctttctcatcacattcataggtactggggattaggagttgtggagtcttgagaggggatcgaattccatctaccacaatctgttctctgacctctcaaatgtgaaatatatctttcttcccctgaggtttccaagagtcttaacccgttactacatcaactcagtctaaaatcttatctaagtctcattagcttgaaggaccaagatctaatcatctcagtcaggtgcagttgaggctcctgagcacaactcctttcaatcagttgaccaaagaaacaagttctttgttcccatcatatagtagtggagtgacagaggataagaaatctgtgttttctaacatagaaaaaaaacatgtgcatgaaagttattaagtacagtattatttgtagttacgcatgcataccccagaaacatcagtgcttgcaatagaaaattaagtaaatttttaaaatttgcttcacttgagtatgtattacttggccattaaaaatgttaatagtaaagacaacttaggaaatacagcacctatgtggaggaaagcaatgagatccaaaatgatatagtattgttacagtcacattaaaacatgcttatgaaagaagacatgaaaataatgcaaaagtaatcattgtgttagagtcagattatgggtgacatttttctgttctgaatgctttacaatttttagcataatttatgtatattttttctttctgtttttctttcttctaaaaatctttgatcacttagcttaaatgtagcatttcccaacccttctcagtccctggttcagctttgatctcacaggatatccttcagggtaaggaaatggaaaggtttattgctctgtttgctcagggccctgtgaccagtgcttctcttgcatatgtacacatatacttctttgcagttatcagcatcttcatttccccaattctaagtttccactcttagctggacaaagttaataaactcagacaccaaaacttcatggctgaatttgtactctgactgggaaacagtctacccccaaatcagcagtgtcagcttacctgggagcttgtgaaaaatgcagaatctgaggtcccactcctagtcttctgaatgagaacctgcattttagcaggatcccccactgactcatgtgcacctgacagtttgagcagcacttgcctaggtggttcaaataatgctgtggaattagggattagggtctgaaaatatttaggttgttgatactagttgtgccacgaaaccacagctggcactccagaagcctggtgtgcagacagtgttcacacccagtgatcagccacaggtacagattagcagctgggaaggcagccatgttggcattctgtactgataaagaaggttctggttctagagtaagcacatgccatcctgagtttcctattcagtgcagccttacagaatgcatagagtaaagctatttgagaatatgaaaactcctcattgagaaagcagattggagaatagcagagttttaagtaccgctaaatggtcagtgaattcaccgttgttcccctctgatatcctgcagtccaaattcagggaaacccaaagtgaggaaatgaacattggcgtggacggagagtgttccaggaaaggcctgcacttctggctaaaggagcagggaaaggcactacaaatgctcagagagagtgggaaaaatctcctgtgtttctttttccttttctccattcatttacatcccagcctgcagcagtctgcagacacctaaaactgaggaagaaccttcctttccaacaagaggacctgtggtctcaagagtatgagacaaaccactgttgcttttttcttccctttgtcctccctccacttgatgttggacacaggcaccgttgtaggaactacatggcagagcaggtaaagccccagctttctgctcagaggacccaaaaaggagccttccaaggaaatggaaagtactgcgtggaccacagagcgggaggagctcagaaagcaccccataaagttgttatggccttacctgcagctgtacataagtgaacctgattctaaatagcatatcaaagactttagaatataagtacaggagaactggctcttcaggtcccagactgacaactggatagcacatgcatggtggagaccttagtagcattgtaaagcctatacaaacagaactgacattgaaagcaaaacttggagcccaaacttaactaggttgattgcctgctaaaacaaaaatatcaagattcttccaaaatgttcaaagtatctggaataaagtccaaaattactgggcataaaagaaccaagaaaatttcaactctgaaaaagacaaccgatgtcagtattaagatgacacagatgttggaattatttgacaggctttaaagtggctattatgaaaatgctccagcaagtgagggcaaacagtcttgaaatgaatggaatgatagacaggtcagcaaataaacagaagaccttaagaagaaccaaatggagattttagcactgaaaaatactgtaagaaaatttaaatctcactgcataaatcagtaatagaatggatttgactaaggagtcagtgaacttgaagataggtaatacaaattatcctatctgaacaacagagagaaaaaaagattttaaaataatgtctgagggacctgtggggcaattataaaaggtctaacattggggccactggaagagaaggagaagaggaggagaaagtgcagtacagaagtctttaaagaaagtaatggctgaaaacttctcagatttggcaacaggcataaacctacagattcaaaaagctcagcagaccctaaataggataaacctaaagaattccatgcccaaacctataatcaaactgctgaaaagattaaaaaagaagtctcgaaagcagttggaaaaaaacaactcattgcttaaaaagaaacaagaatttgaatggttacgaatttctcatcagaaatcttggaggccagaaagaagaacagcattcttaaagtatggagagaaaaagaattgtcaacccagaattctatatccagtgaatatttcaccttcatttctaaaggatattaagatattattaagaatatcttaacaaagaaactaagagaattcatagtcaatagatcttctcaaaaggagttttaaaaggaagttcctcagacagaatggagatgataccagatggaaacttcaaacatcaggtataaaagaagagtggtagaaatggtaaatatgtgggtaaatataatggacagttctctaaaataggtttcatagttttattagtgttctcttagagggacagaactaataggctatatctacatacatatgtattggggagtttattaagtattaacttatacgatcacaaggtcccacaataggctgtcggcaagctaaggagcaaggagagccggtctgagtcccaaaactgaagaacttggagtccgatgttcaaggacaggaagcatgcaacacaggagaaagatgtaggctgggaagctaggccagtcatgtccttttcatgtttttctgcctgctttatattctctggcagctaattagattgtgcccacgagattaagggtggatatgccttctccagcccactgactcaaatgttcatctcttggcaacaccctcacagacacacccaggatcaatattttgtatccttcaatccaatcaagttggcactcagtattaaccatcacatgtctaccccttgtcaacttgaactgatacacatctcctgagatcatacataatcttcaaataaagccaaaataaggtcataattacgcctaacataatacaactatccttcgtacaactagaaactcaccaatccccaacccaaatactattacataaagttaacaatacttaaatgctgatacaaagtcagtaaaccttatgtcacatgataaaggagaaaggaaataaaatgaagatgctttcttaattaagtgtatgcatgcacaaacatgtttttaacaaaaggaggaaatactcatgacaattacagtcctcgtttctgcagctggtcacgtggtcgtagctggtattgatgattgccttctactactacccattctgtattccctttgccttcagtaagcacctcagcaggtcgttttttttttttcctggtggagtgacccaaaaagggtcacttcattcctgaagggtctggatcatttgtagtcctgcctggattgggctgttgtagtttctcattgatcttaatcacagggcatggtaatactaagagatgccttaatggatctcctgtattccatgcatactcttccttacctccgttctagagtagtagactgatttcatcttgatagtctgggtcagtcaccccagccaacattgtaactcccttctcagcctgttgacttaaaggtagaggagcccaaagtatcaagtggcaatcttaacttccagtttaatggaattattgtgtctcctggtggcagcgttcctccctctggaactaagacctctaggccagcagaacgcaatgtcatgggaataggaagcaaaaattttgctagtggatgtcaatcttttaaaaactaaattaaaaaaaaactaaacaaattgtagcacagcatctgacacaaagcaaactctcagtaaatcgcagcagctgctgttattacattcttccaggtctttcctttaacaaatctgttcacctgcaatgctacattttatcattatggcaggccctgtgggtgttactacttagattttacatcttaaagactgaagtgcagaagtttcatggcagacccctgccaaccagctggaaaattcccaacccaatgtccagagcgcatctctgactcccagtcctgaggcctttccagttcaccagaccacctcagccattagaagggtgtcagctggatttgtgtgcccaacgaggtgtgttgcttttatgtaaaagagaagcacataaggaagaaatcatgagtgttcaggatccctttccagtcccttaaagaggctgcttttgcagtagcgacatactacccagtgagctcagccatgcagtttttcctgcagggttagagtggatcacttccttcagttgatcaccatttgaagtagcaggggtttgagttcagaggccatgtacgaaaatgattttaaaaatacctggagcctcatttagcacatgcaagactgagactcagccaagggggctatctagagaaggacggaaccccctccctctgtactatttactctgagttcataaaaaaattagccaggcgtggtggcgcatgcctgtaatcctagctacttaggaggctgaggcaggagaattgcttgaacctgggaggcagaggttgcagtgagctgagattgtgccactgtactccagcctgggcaacagagtgagactccgtctcacaaaaaaaaaaaaaagaagaagtaaatgggttctaagtgtgtaaataatgaggtcacagaagtcttcatgtgttgcagtgagtctttgttgaatatgagccaactgaatatgttgttacagtttctagtacctttttaaaaattttttatatttttccttaataatagagatgggggtctcattatgttgcccagggtagtctcgaactcctggactcaagcaatcctcccacctcgacctcccaaagtgcttggattacaggcatgaactactgcacttggcctttagagacatggttttgctatgctggccaggctggtctcgaactcctggcctcaagtgatttgcccacctcaggcctcccaaagtgctgcgattacaggcatgagccaccgtgcctggcctgcaactgcctttctagcctttcttgttctcttgtttcttctctcttccccacatttcgtgggccagagagaaaaatagagatggttgcatatttcagagcaatctttattcccaagcattttatcagccactagaagccccctatgtttgccactctgggcgggggggcacttcatggagtcaggtaagatgcttactgccctctggcaccacctggtctgcctctagttaggcaggatgttggaggctgctagaaactttgactgctagctccatgaactgtggcttgggagcagtaacctaggtcaggaaaaattccttccctaggaaacctggccttgtccatttaaatcacagtatcctgcgattccagcccatcaggtggaactgactggaggagcacctacttttggattttttcccggttctctaattaatggcttcttacctgtaagcttagattagctgctgtttataaggctttcccaaggtctggcaggaacgtgccagtgccccagaactatcaggtttgtattgcttgccagggctctgcgaagattccaaagcacatctttcaaaatactaaatatttgtgttgtattatatccatatccctatgcattacggaaaaaacaggaaagtataaagaaagccctcaccacccaggagtgactgtcactgtttacgctctcggtacgcttctttctggttgtaattatacataccaccaccactaccctgcatacacacgtttttcaccgttgatttccctaggctattgatgaccccctttcccctcagtacttaacactagagcatgagcatttctccacatcatttttaaaacattcccagaacatggtttttattgcttccatggctgcacttggggacctgccatgatgttcctaactggtcttcattcaggctgactgcagtttccttgattaatgtctttgtgagtatattttaatttaaattctttatttaaaatgaatacctagacataaaattatcagatcaaagaatagagagatatataagagggtctcactcactactgctggcctgtgctccatgtcttcccaccgctctgccgcccagctcctccaccgatcacaatggaagaagagatcaccatactcgtcattgacaatggctccagcatgtgcaaagctggttttgctggggacgacgcccctggaaccatgtttccctccactgtcaggtgcccccaacaccagggcatgatggtggggatgggccagaaggtcttctacctgggcgacaaggcccagagcaagcacggcatcctgacgatgaagtaccccatcgagcacaggattttcaccagctgggaaggcatggagaagatctggcaccacaccctacaacaagctgcatgtgttcctggaggagcacctggtgctgctgactgagggccccctgaaccccaaggccaacagaaagaagatggctcagatcatgtttgagaccttcaataccctggacatgtacgtggcagtccaggccatacttctatgcctctgggcgcaccactggcattgtcatggattctggagacggagtcacacacacggtgcccatctacaagggctatgccctccccacgccatcctgcgtctggacctggctggccaggacctgaccacctcatgaagattctcacagagtacgactacagcttccctaccacagccaagcgggagatcatgcgtgacatcaaggagaagcagtgctgcgtcgccccggactttgagcaggagatggccaccgctatgtcatccttctccctggagaaaagctacaaactgcctgacagccaggtgatcaccattggcaacatgcagttccagtgtttggaggtgttgttccagcccttctttctgggtgtggaattttgcagcatccatgagaccaccttcagctctatcataaggtgtgatgtgggcatccacaaggacctgtatgccaacacggtgctggccagtggcaccaccatgtacccaagcatctccaacaggatgcagaaagagatcactgccctggtgccagcacaaggaagatcaagatcatcgtgctcccagagcgcaagtactccgtgtggatcagcagctccatcctggcctcattgtccaccttccagcagatgtggattagcaagcaggagtatgacaagtcgggcccctccatgtccaccacaaatgcttctaaatggactacaagcagatgtgtagcatttgctgcataggataattcacacgtataaatttgcccctgacaaatgtatacacctcatgccagcctcacaaaactggaataagcttttggaaagaaatttgtccttgaagcttgtgtctgatatcagcagtggattgtagaacttgttgctgattttgaccttgtattcaagttaactgttctcttggtatttgtttaatactctacatatctttgatttcagcccttaagtgcatgtggtttggtcacttcatggctgaggtgaagaacatgcttgtggaagacaagtctatggcttggggggtctgtgtggctggcagtctcccactggtgcagggtattcatgtgtcagggctgagtattctgggatttctctagaggctggcaagggctcctgaaccagttgtcatttctgtcttgcctgtaggacccagtttcctttcttagctgatgttttcctgccagaacaccatgggctgttacttgtcttgagttggaagcggtttgcatttacacctgtaaatttattcatccttttcatttatgtaaggtttttttggtatgcaattcttgagtctttaagagatgacaacaaattttgttttttttcactgttatgtgagagcattaggcctagcagcacatcattgtgtaagaaaaaataaaagtgctgccatttaaaaaaaagacatataagacttttgaaggactgtgtatttttgtgtctgtctatatctatatatattacagagataatatagaattactctccagaaagcatgcagtcatttatgtgccttctagctcatgcattctccatgaaggcagaaatcggctattagggttgggggcagtcctagagattacagtggtttgtggccctcctgcaggtacagtgcataaacagatacacagtacatctgtagtactaaaattttatacaggggctatattgacaaaaaggttgagaagtactgttctagctgtatgtgactccatacatctgtctccaccttggaagctttcaaatcttagctttgggattttggttttgggtttaagaataatatttttctgacgtaaaacttcttggttcattatacaaagttgaagaaactgagaaagttgtgaataaaatttatctggaggttaccaatattaatattttaaaatattaatacttaatattttaatctatgtttttaggtttgtgttccgcccttcttacataattgtcattgtaggattatcattgttcatctgagccaaggaccaccctgaaatatcccttgtgctatggtctcatgcaagggtttcccatgcctgtgagtgtgtttgtgatcccacatgtatcaggtgcctggctgctctgggacttgcagtaattgtctcttgtttgtttcaggtgtgatcccctgggcccgtttgttgtcgggggagaagacttagacccttttgggtgagtactgctggggaggtggcagcaacacaacttgcttttgtggcttttcagccccagctcatcttctaattttagagttttcggtcagtctcttcctttggggtggaggaggcagttgttgctgagcagctgagaaagcactgccacatacgctgcccctccacacctagagcggtgcaggagagcactgagtgttggcagggaggtgaacaagcctagcaggcagctcttctgccatttcccggtccccctgcccaccctagtttatcagatgtatagtgaggagcacatggtgggccttagggcagctcagggctattcagaggttgccccacttaataaagggagtctctgagccccattagactctggatggttcttatgcatccaacaaagttactacagcctctgctatccactgtcttccctgaatgattccaaatagattttaacctctgctacaaagtgaccccgacttcagcatctcatttgtagacagtggggatatcacttaagtctgcagtgcagcttaagcagtgacctcaaaatttggggaaccatcagctcattcatcctagtttgagcacatgaggtcaggtcagtggaactccatgagggacagatgctgtcaggagccacacttaggcaatctacaggcagtcagaaattgccctgaggcccttaagggaaagagaaaaaaaaccaacatcacgaattacctcaatgctataattagtccttaaacctaaagtagcaccctgcagaaccttgtgagtgcattgtagttgaccttggcaagttctggctcttggtcttgatcaagttggccctcttgagtatatgatatggcagggatctcaattttgaggagccctacagaaccaaaagcactgtgcagaaccaacccctgcagagccagaagtactcagctgtgaggtatgctcttcgtataggctttgtgttcttgcccttgcccactttccgctggctctcaggcagccatccacatgtctgcttgggccatccagagtagacatcccagccattcttggtgcattgtaacctccctcgccttttctccaagggcagtccttgccacacctgcttacctaacttttcttcttgcctcaggcctcggagaggtggcatgattgtggatcccctgagatctggcttcccaagagcacttattgacccttcctcaggcctcccgaaccgacttcctccaggcgctgtgcccccaggagctcgctttgacccctttggacccattgggaccagcccacccgggtacgtagtcactcaggtatgctgagaagtaggacctgatggcagcttggttcagtgtggcagcaatgaaggtttctagccccaggcacagagctgccgctgccttcacctgttgctgccaggagagtggagcctcctccagggccctgcctgatttctccctggagccttctaggagcttcctatccctcagtgcctctctttccccagctccactctggggaggactcaaagtaggaggaactaacaattcttgaaagttaagtatgtggcagaaactcagtggatcctttcttcagcagtcttgggtagatggtggcgtctacattttatagatgcagaaaatgaggccctgaaagattaggtaacttataccaagcgggggagtcaggattcaaaccccggttgtctggctcttgagtgcatgtgtttaaattcctcacaccgccacatcatgttgaagggcaggctccctcagtgcagggtcatgtctgcccatgttcccctggtctctccatcactccaactcatcagcccctctttccattccagacctaacccagaccatctccccccgccgggctacgatgacatgtacctgtgaaggcctcaagaatgtaacatcccaggcttccctccattctcctggagctgccaccgctgtccccatcagcaaccatgttcttgcaggctgggggcaagggattctgctcatgtgtttgcagaccggctgggatagcctccccaccccttatcagagccaagacacctgctgcagctctccacctagctgcagatagctcccaaagagaaatcagtgtgtctctttcaccatcagctcctcccctttcaccaccagctcctctccacttcccaagggagactccggcaaccttcagcaacatatatcctcgaccagatgcagtgctataagaacagaacgcattttggatgttattattaagaaccaaatgtcaatacagaattcatgttgccggtttcccacttttctttttacattaatgcatagctgcttccatttatgagactttagagtttgagtttctgtagggctgaatgactctttttcctgcccagggcccattcttgcttctcaggcaccttccgtttattaattgccattgctcctgacatcactaagatgggtccccttctggctgcatgaatggaaatgagtgactggaaatcccataggccacaagaatgactttcacaagggcaggaacattgtggaaagactgcatcattctgatgaggcaaaatcctccagctattcctgtctgggccagttttgtaggtccatctgtgcatgggcagcagtagtcaaaaagccaaggaaaaaacagagcagacctgaaggctaatcttatttttgccactaacttagtgaatgaccctaagcaagttccttctcctcttagggccttgtgccaagcctatgaaattggaggtggctttcctgctctaaagcattttgatgtctcattctgtgtttggtaacccctataaactggggcagaggaaaagaatgatggttcaaggccatacttcccttgaaccttgtgtggttcttgcctaactctgtggtttttggaccccatggggcccagacagagcacaggagcatgggctgcctctgagtgtggtgttgaacttcgggaggagcagggagccctgcaccttgtgtcctggcccacctgacctttggtgttctccggatccttttcagcccgaggcctgacagacgcgggcagtgatgagccctgttctggagtggaaagagcacgatagagcaccaggctaagaggcacgagatcaaggcggtagtcacttccgctctgcagctagcatttcaaccatatgtggatcctttcatttctcagctccctggattccttcccctaaattaggacctattatttacctgtaggtaagcaagctactgtagctcttctgaggtatctgccaggctgttttctgtagcctcagattgcctatctgcttagcctgagaacaggtagatgaaaactaaactgatgcctaggcccagggtcagtctcagatggaagctgggcctgggtggggaggctagcatgcgtggctccctgggtatttctgtcagtccccatggcaagcagtgatttagtaaaacaccccagagtcagggaagccaaccaccttgaaacctttagaacatctctgctttggagaaagacccagagatcaggcagaggtgcagattcaatcattactcataacctttgagagatggcaaatgggaggagtgttagtctttgttttggaattggaccattcttgcaaccaaaaggacttagagcagtttgctcataaagacatcctttattataaaaggaagtatttaaaggatgatagagaccatcagatagaagcagggaaggtagataacttttaggaccttgatgtgaggaaaagataaaatttaaacaataaatttgccacttagattttctagcagcaaagtccgaaaagatagttatatacaaaattctgttttctgaaaacaaaattgtgattcaccttcagaattggccattttttttgtgagtttccttgcatcaaggacactgagaaacacagtcattgtcttaggtgttctatgggaggaagtgaatagagcctttaggaacttcctggtcaagcttatggtgcttattttgatctgggccacttccctccttccagtcatgagtaatcatcaaggagcaagttggagtgtttcaggtgtatattttgtagaacccaaaagattggagccttaacaataaacatcagcactaagtgacctgttcctccttttttaaatagcagctttattgagatataatttacatacccataatttacatacctgtttaaagtatacaattcagtggatttagtatgttcacagtgttgcacatccaccaccatttctaattcctgaacattttcaccacctcaaaaagaaaccacacacccattggcatgactccccattcccttgctcccagccccaggcaaccactaacatctgtctctaaagattttttttttttttctggacagttctcataagtggaatcactcagtattatggccttttgtgtctggcttctttcatttcatgtgatgttttcaagattcattcatgctgtagcatgtatccatggtatggatatatcacattttgcttatccttttatcagttgatggacagttgggttgtttctacaaaaaggctattatgagtaatgcagccaagaacatttgtgtaccagtttttgagttttcagttgtttgagtttcagatgttttcagttcatttgggtatataccaaggagtggaattgctggttcacatggtagctctatattctactttgtgaggaattgtcagactgttttccacggaagctgcaccattttacatttccactggtaatttatgagggttccagtttccccacatcttcaccaactcttgttatttttcatgcttatggccatcctagttagcgtgaagtagcatctcattgtggtcttctcttccattttttaaaaaagaattttgacctacaccaagcaaggcagagaccagagtcagtcccccttggggagcaatctgtggttttgataatcaccaccttgggatgaacatggctggtgagctgcagagcagttgatttgacttttggggatggttctaggctggatgtgatacagggcaggttttgtctctagagaaagttctcatgaccttcaggtctaatgagattcagatcatcactttggtttggtttgaaatttctttgtttatccagtgaattacaagtagaataaagatctggttctaaattgtcttttggtggtgaagtgccatagaccatttcggaccatttctatgatgtaccagcagcccccacatcacacctcctcttccttggcttgtctcttccccaattcttagagttagcagtgtttcttactgcattcatctcctcagtcataagtgtctgtcaacctccgttgtgaagtcatgagtctcttgagactgaaactccaagaatgtattgtgctcacagtggcgatggtgttcctgtgctggatggtcagtggttgttgacatgtagttagaaaataggtagcaagttccacgcagcctcactctttggaacctagtttctcctatggcctccctttctactgttgttaataacattctattaatgatccatgcctctcttcacaggaggaatattagaatctatggagcagttagtattctttgtcacctaaatttgtctacttctgtacatttccaataaggcaccaccagggcaagggaagattccccacatgtatatccccagctgtttctgtcataaaacttgcatgtgtataaaccactattgactttttgcaccaaaggagatattcaaggacagacatccaagtccccagccctttattgcccttgggataccacaaggcacagatacaggcagctgctgtgtggctctggagttcctaatccccagattgtagcaatgatgatgtgatcctgctgctctctggaccgtaacctttttggttacaaaaggtaaatttctgtttactgcatctgaaccccaggactaatgcgtcactgcattaaccccaggacacatggaccaagtcactgcggccgtacttggccctgaatctgtcctggagggtgggtcaaaaggcaagggtggcaggtaggatggtaggcagtgaggggtggcaaggcctagctgactgaggacagacccagcaacaatgacaggaggtttgaacacctcacgagtggtagtgcccatgggaggtgcgaagtggaaggcccagcccttgcttggaggaacgtgaggctgatggtgcagtgcaatagaggtcactggatgcccatttgaacagctgcgttccagatgagccacctaaggtggatgttgtgagagtcacagtgggtttagagggacaaggtagtgagaggatgctgctgacgcattagtcctgggattcagctgcagtaaacagaaatttaccttttgtaaccaaaaaggtaatggtccagagagcagcaggatcacatcatcattgctacaatctggggattaggaactccagagccacacagcagctgcctatatctgcaccaaaaagtagatgtccttcacactgccatctggacaccactcagctagctcatccaagttcaaggctcaattgaatgcgtctggttgttggaacctacatggcctctcaaatggtactggcatggaatattggggagatgtctttattccctcttcccacctttcctggaaggtgcactgggacagaggtctagtgagccaatcttctgtgttgtctacgccatggaccatgatataaatgggtaccacagccttgcatgcctgagcctaaccatctcctgagatgcttgctctaagtacacattagtacatgctgggccccaatctagatctcaagggaacggccttcagatccatttttgacaagttccttttgtgagtcctatgatcatgcaagtttgagaactgagaagggaggggaagacctacctccttgttactcagaccaccagcaacagcagcatcacctgggaacctgttacacatgcagaatctcaagccccaccccagacattgaatgagaatctgcattttaacaagttctccatgagatttgtgtaaacttaaagtgagagaagctcacatggactatgtctttttcctttacgtgaatatcgagtacaaagaattgagccagtcagtcctcttggttaatggcacattatgattaatgcatgcatgaactctgattcgaagttttcgttgattttacccccagtatccactccattcctttgcccccatgggtcacttagatgtgtttcatgttatctttaaaaatgcagcacctttatagcatacattatatcttcaaaccataaccataatgaggtgttatccccatttcctgtaccagaaaaggaaggattgggaaggtccagtaatttgctcagggtcaagcaggagtctcagactcagtcaagcgtggttactcacagccctccctttctcagtgtgtggccttcctcatccacaaaatgagcatcacccctacctgcaggattcttgcaagatccaaccaaataatgtgtcttattaacagagagttggggctcggtgggtgcttgctgcaattgttactaaagtcatatgggtagataagggtgggactcaaggacaagagaggaaccttggaatatcccccagtgcaggaaacaagcatttatcaggtgcacacagcgtgctaggcttctcctcatcgcatgtagtacccctgacaaccccaaggtaaacacagctagtggcattagttgagatgctgcacctaccccctggggtggcagaaccgtgattggaacccaggtcagtgctcttttcagtagaactgctgtacccagacctcacatcctctctaggtgaggtgcatgggtccctgggcaaaacccattccagaagctgggaaaccacgtcaggacttgtgtgagaaaggagtgatgcttcataatccccaggatggtcttaaggctcctcagtcagtcctatttgcacagcgtgcctcatgctcctgagtacctccacctgcagccacagtgcccagagcacctggttaggaggagcatctgaaaccacctgcacaacctccattccacagaggaagaaacaggctcaagaaacccatatgtgatggggagctcctaacaggcttccctgggccacaggaatgggctcgggctctctgctgggctctgtcacctggctccatgtgctgctcacctcggccttctgagtttagtaggatggcagctagtcttccctattgacaggtgaaaaagcaggtccacagctgttgagtgactttcccaaggccacacagaccacaaatcctggctccaagtccagggcgtttccagtaagcactgtccaaatcagtcatggaggtccctgagtgacaaaaatatgcaggaccccttctttccccctcccagttcccgcagctaggctgagtgttaagaggaaggtgccatacaggttcagcaccctggtcagcgcccagcctccctaaagccgctggaggaggcctttggagccagctcaggtcagtgtctgctgcttccttacccaggatggcccactcttggggacagacaggcatcctgagaggagggggcctggacctaggtgtcttgccacccaatacagagccctgccctctccctctccttcagaaggaagtatgggagcagttccatcctcaaggtttcttggttcccaggacagaaatttgagtgagaagcatgtgaagagagggatggcccaggggcccttggccatggtggccttggacaagtttggctttccccatctgtaaaatgtagataaggatggacccacctccccaagatcctgcctatctgtgagagtccatgactaagtgggccatgggctggactgagttcagtgctcccccaacctgccctcctcctctcccccacagagcttcccaatttacatgtaaaccttgggcatcaaagtgacagctgatagcccaggtttgcccacaaatgtgctctgactggcgtgcatgttattaaatttgataagatgcatgatggcagctattagagttttgactctgttctttaccagtagtgtgaccttcggcaagtcacttaacgtagctgtgccaaagcatcctcatatgtaaaatggaggtagtgataggacccctctgtaggattgttatgagctttaaatgatctagtccatgtaaagacatagatgagggcttggcacagagagaacactattgtttaaaaatagggtgacttaatgtgtgtaataagtaactggttcattgcagtgtacaaacatgaagtgttttctttttattcagctgacctctatcaactactcctttcgtatctcaatatcttgggcccagccaataagtaactgggcactttgattttcaaactcagtccagcccagcttaaactttccacctcccaaacttgcaagaggtggtctctggcttcttctgagctcttgctcctccagtgtggtgggtgagggggaggaagggagaaaagtaaagtctcttcactggccatgatgatgaggatggtgagaggagattttggtttttgtttatttgtttttttaagaaacagagtctctgttgcccaggctagagtacagtggcatggtcaaagctcactgcagcctcaaactcctggcctcaagtgatcctcaagatggagtcttgctatgttgcccagcctggtcttgaactcctggccttatgtgatccttccacctcaccctctggagtagctgagattacaggcacaagccactatgcccagctacaggtggtcttactctaatccatactaggtttttgggttgggtttggtttggtttggtttgatgctggggttttcagtagactacatgcataatttgggagtggtggtgagtgctttgtcctggaccctcagagaggagtggggatctctgtccaatctaagaggctaagaggctcacagcccatctctttgacatagtatgctggcctgcagtcacttgcgccacccacagctcagcctcctctcacctccctgcatcagtgcttggaaccccaggaacactggggtccttcccctacctacaagggctttgggacacttggaggggaggtaggactgtccctcctcctccctgatccccaataccaccatcccttcaagtcagcgtgggctgttcccacgaggggcttcccacttcaggaattttctggtcagaaatagacctcatctccatgttcacaaactcttctgagctccagaagataacatttcaagccctctcaagaatactctccttacatttttcatctgttcagtgctgtatctccaaaacctagcacagagtgctcaaatctttgttgaaagaatgaataaagggtgcttggatgggtaacactcaggtggtctgcaggccctgcagctcagccctgcagctgggaggcaggcatcggtccccttcttaagtgatttattaagtcctgggcagggggaagggtgtggaggtctggtcccagcaagtggcatctcattggacactcccttgtcctcaaccaccattttcaggcagcgggataatccctttcagcattcttttacccacacaaaggtccagcagtccagctgctcttgaaaaatcaggagttctggtaaccctgagcccatccaccacagggcaacagccagccagagttgaagcagacctcccctttaatcctgccgctgtccacagccacctgcttagttcgttaatgtcacctgccgagccctgcaggcatttgcacttgggtccctgctttaatctgatgagaaagggtggggactctcagggggagagtcagcagtagttaacaactctcctgtgggtgcctaacccccatgagtgacttcagtaaaatgaaatgcggacatgaaaaggaatcaaaaatagaggaatagggagagattggaggaagggaagaaagatgagatgggagagaaatggctttgctgaatgcccttggccctaagtcagtactggcccagacactgagccacccgggaagaggttggcatggaagccgccttcttcctctgccctccctgctcccctggggccagctttccttccacttgctaacctccccctcagcccaggagagcagcagctgccaccttgaccttggtggctcagagtccaagtagggacaggttgttgagatgaagtacctggagcttgaggttatgtcctctggctgcagcgggatccctgagaagggctggggggtaccagagtccacagtcccatggacgggcctccccagcgccagtgtcacccctaaagggcatgacatcagaagattcttcttgccacacacatctgcaagcgattataatggctgacagtgacctctctccatgtgctatacactgtctctgagaactgattcttcataatggccctgtgatttcagtactgtggttgtccccattctatagatgatgaaacactgaggcatgcccttcagtatgcctcatctccacactccagcccagaatgcagacctccctcccgccccctgccacccccctccccaccaccaccaaccccccttacccccaccaccaccgcagtgcacgccaggctgtgtaggcctctgagcctctgctcatgctgttcctctgccccgagtgcctttccttctctccactctttcttcacactgggtactgcctcactgtttaaaatgcccgttagacacacccttctttcctggaagaagggtgaccctttctgaccccagttcaatcagatctctcctccacacacacagcccactgtgcatgctcatcacagcagcaatcacactgtcctgtttccccagacagcctgtgaccaactcaagggcagggtctgtgtgtaccctacagcgcctagctcagggaggaatgcagattgtgtgtgaatgaacgaacgaacgaaccaacacaaatagctgacatcaagcaattatggggtgccaggcaccgtgctaagtgctttacaggtatcatgttattttctgctcaccacagccttatggggaaggcactgttattagcactacccttttacagatgaggaaacaggctaagaggcattaaacaacaaccaagcatccaggcagtcaagactctaatctgacttacattctcatttgatggaccatcatcctcagtggacctcctctgtaagggatcctgcctctgacaagctctctgagatttgagtagggagaaagctcagaatcacttggccctctgggaggaggaagatggtcatcctgcaaccctctgcaccatttaggtgtcctggtcctgtccatctgctcatggaacagcttgatctagaagagaaataatgtggcgaagagggtttttgggccaaagacaagaaaatatcacagggccagggttgttactgtctttagccaggatctggccattgggacatcggctcccctcaaaggcgggggggttggaagcttggggagtctcttggctaaatcctacccatctccactatgctccatccctaagatagccaacacttgaccagtagatgctaacgtacctccactgacaagaagctccctaccactccagcccagatctcagcaagtttctctttctctagctgaaatgtacctcctggggaacatcaaaaggagtccattctccaggagagaccagcaggcccagatggagggcctccctgactttgtgagtgcctcctgacagaacctgacacagaaccccatcctgtggcttcttaataatgcctcccttcccctctactcctgccccttcaaagctctccagacacagagtaccaagctttggaaagtcctctgcttgtgttatctgatcccccagctttcagagaaggcagagtgggaaggtttccaattttcctctggtagaccagagagatggagtaatttgcccaaaggcccacagagagaaggggtgaccaacaggacctagctctcctggttcccagcccaggatcacacagtcccctccagaaatgccaggacagaaatgcttctggacatctctccccatcctgctaagggcgggggaagcaggaaaaatacagagaaaccagcctcgcctggggaggagaaacttgattgttgctgtgaggttggcattctgggaactgcaaggcctatggctggtggagaaacagaaaatgtcgtcaatcatccagaggatgtcctggcttgaagctgctttacaagataggtgtccttggtctctgggcttggtcagacaagagaaagctctgtgtgtgtgtgtgtacgtgcaagcgcatgtgtgtgctcttgcacatatgcacatgtgtatgtacagacatgtccattcagtgaggacattttaaagagaatcccagggaaattaatgcttattctcaaggaagggagcaaaaatggtggaatctcaggcagctggcattttgggctgggagatgcctgaggtaagtgagtagatgtgatcatggatactggggttccaaagggccaggcctgggcactcaaggtccttggatgggaagaatccggctggtttctcacaggcccctaaacacccagcaaatgtctcccaggtttagctggaacctgggtatgtcccaacaaggttaggggagaagggtcttctgagggacacccctctaacccttccacataaagccctaccaaggcccagggagaggaaggcaaatggattcccaagttcccagctgcagggcccagtgacaaaatcagcacctttgaggcatgtgatcctttgcacaactgatcctcacccctagagagggctccaggagtctgggaaggaaccatgggcctcctgggtcctgcatatggctctgcagcactggcaggtataagaagcttttgttacatttattcatccattcattcaacagtgagcacctactatgtgccaaacatgtttctaacactgggagtacagcaagaaccagttagaccaaaattccggctttcatggagcttgcagtccagcaggagaggtcgtgggtgggaaagacaagtacaaggctcagcctgctgggtcatgattagtgatcagagaaaaataaggcagcgaaggacaaaagggaatgaggtggggtggggtacaaatttaaatatggtgttcagcaaaggcttcactgaggagaagatatttgaataaagcccctaaggaggtgagggagtgggccttgcagatactgaggggaagtaccttccaggcagaagaagcagcacgtctgaagtcccttggatgtgagcgtgcccagtaaggttgaggaatggtcaagaggcacgtgtggctggggtgagtgagcaaggggtaaggggtgagagatgaggtcagagaagcacagggtcccaattgcttagtgccttgtaggccactgtgagggatgaaccctggtttgggggtacctgaagcttatgcagtccagtggggcatcctcaagatagataaaccaattcagggccttggaaggggcttgtgctagtgagaggcccggacacttaagctttgccagtcttgctataaatctgccactggttgtggtgagaattttggcttttgcctggagagggagccataggagagttttgagcagaggagtggcctgacctgaccagcctctggccttcctctggctgctgagtggagcatgaacctggtgatggggcggggaggaggggaggagaagggggtaagagagaaagccagaacaccagtgagcaaccctggactggcggtgacagccgagggtggacagcaatcagattctgaaagtggagctgacaagatgcgctgatctggaatgtgaggtgtgatagaagaaaggcagaagggttgaccacagcgtttgaggcctaatccagctatccccagttgaggtggggaaggagagcatcatcatccctggacctcatactatgcagttctccattttatctgtaatctgcaccaccaccctgaggcagagctttcattaatcccacttcacagatagagaaatcccgactcagagaggtggagtaacttgcccaaggtcacacagccagtaagtggcagagcctggattccaactttagtcttaccaactccaaaatcggtatctgttctgatgcaccaggaaaagcaaggtttggggccctaggagcaggttaggtgggagaggcagttcctggaggagaggcacattccagtaaccacagaggcccctggaatgcctgcaaagaaagttctcagcatcctactccgtgttcctaatcacctcctccttaaacctgtttctgatccatcagctggcagatctcagctgtaatcatggggaaatgcttttgtcatctcttaagttttcttaattcactgacaaggtaataacgcctcagtccattatacacattttctaaaggactttcaacattagaatgcaaagcaggcttctctggcttagaaaaacctgagactcctgggatttaatcatcaaacagatttagcccctaaatctgtttgatgattaacatcaaacatttcgtaagaaaaaaacaaatggtagtgcggccagcatgtccaggccacccaaatatgcccaatttctcccctaaataaactcattgcatttaaactgatatgaactgatggtcccagatgcattcactcaacaggtttagtatccaaatgagtctgccaccatcacagtaatccatatgacttggttgatatttttttaattatcattatggattgaaaagccttagcccatgatttgggatgtccaatcctatgtagtttacttagaacagctcatgccacgttctgtggctgtgcctacttggagcctgggagaaagcgacacaacagtggaagcctaggacttgtgaatcttttaccatcttggagctttgctctttccacaccataccccttcaataccacaacaaaaacctgggaagccaagctaaacaacccttgtcctttccagtcttcctctagctctctgctcttggtaaaacctaccagtaggagcagatatttgatctgtcatagaagctgtgatattacactccccagatgtttaactcactggactgaaggctcaagttacagctaatcagggcctctctacactacagaccccatgcccccccaccctcccacccccaaggaacaggatcctcggcccatgtggccaactgagatggagtaagtaggacctacattgggcaggggattcactaaaatggctcctgtagggtctctacaccagtggcttagaaggcatgtgctctcaaagccctctgggtccattcagactgaaggatgcctccccacagtcctcaaacacctgtatctccttgccccagggcctacttcctttccttaccaagagtttaaagaaagtctgcaggaacctagaaacatttcataagaaaaacacaaatggcaatgtggccagcgtgtccaggccacccaaatgtgcctgatttctcccccaaataaactgtggcttcactttactactatatgagggagactaaggttacaaattcagcataaatttttttttttcctgttatccaaataaggtcaggagcaagagacatactatggaggagaaggtgatcaaggcctgcatcatgcccacagaaatacaataaagccctcaccctttcctgtgtaaaagatccttcttgcccagagaactgggtaatattgtgcacttggctttgtaaaaatgtgtcactgcaggaaattagaccccaagaccaaaaccaggctgtagcaaactttgaactgaacccaaccccaccagggagctcttccctgagaccatgagagctgctggctgtggtggtccctgaggtcaggccagaaaatggcagggagaatggttagtgcctggtggatgccttcctgccctggaggggtgactggagatagagactgggttcccattcccagggaagaactagagggacctgaggggtcatccagtccaaccccctcacttgaaggcagggcaactgaggcctggtgagggtaggatcacagtttagtcagtgggggtactgggggtcactctggtgctgacttctcccctcatcatgaagccacctcccccaccttagatgatcagggctgaaagggacccctccacggccaatcaacaccctcactcagccaataaggacagcagaggtccctcactccccaaggcatgagggaagaggatgggcaacctttcaaacagctcccaatcttgagaaatgccaagaaacctcatcctccaagagcagcggtttccaaacttttgtatttttagcagcagaagccatcctccaaacaaaaccgtatgcaaaacctcagctacaaaacagatcagtgggctgcttgcccgtgtggggcatgggctgggccccgagctctccctccagcacccagtacttcttccacaaggccctatgtgagctcagtttaaaaccccagggccttggcaggggtcaggtgggcgggagcagggggtggaccttgtagcactggagctaaagcagccagataaggtgggctagttcttaagacctctggagggtgtggctagtctctgagacctggacaacttcattctccaccagggcctggcccccatccccattgagctgtctcatgcgcaggttaatggagccgtaggtcttcctggagcccttgccggggacgaaggtcctccggcggtacagctcgcccttgcacagggagaccatgagcagcaccgacaagagcatgccgcccaccgtgagcagcccgaggcctgcgatgatgcacctgtccaggtgggagcctaggcgggcgtagtacatctccagtcgttccatctcccgcgctgtcactgtgtccggattgactcgagcctcacgggggatggcgtatgctgtcaccaccagaagaatcccactcaccaggaaaacgagggcggaaacaaagccataatccaccgggcggctcacgggctccagggctggcccctcctctgaatgaagggacagatcatcccgctgggatcggggcagtgaggagacacccccagggggactgggtgagctgcccagtctcgtgttcccagggttctggaaatgggtctcatgctcctctgaggagaagcaggcattctccacaccctccctggttggggccactgggcccaggggagctgatctccttggggcttggggaccattgctcagtgtcttcagttccagaccagggggagatgccattgggaaggagggccccagctcatcccttggccccttggcagctggaagagaaaaaagaaagtcagttgaatgtagcaacctctccctgttgtggaggacatcataccagtccctaagcacatgaaggtgagtcaggcacaattcccacttgggggtgtctgccagacagaggggaagacagggaataagacgatgacagaacagtgtgatccaagcccagatcccactctaccaccgggtggggtatggctgtgggcaattcactaatcctgtctggcttcagtttccccacctataaaataatactactactaccctctagttcgcaaagctggagtaggattgagataacctatacgaagtactcagaacactaagtgctcaaagttagcgatgagttcctattatactggagggaatgtaggtagtgtgaatatcaggctcaaatcccagcttcaccacttgggcttgggcaagtgatgtgacctctccagattcggtcttcatcttatctataaaatggtaatgaataaaatgcctccctcataaggttgttgtgaggatttcataaaatagtgcatgcaagaccctggccagtgcaatccatggaccttgttgtatgagggaaggatgacggaggggtgggggagggggtagaaatgcagaagttgttgtgggaacaaagaggaagggaagtttctgggagttggtggcatttgagccagatctcagaagatgaattggatacttcccagcaatggaaggtgatgagggcattctggaaaggggaacagactgcctcagaggccagctggggccggctcacagaggactctgaaagccaggccaaggagcccgagagccatgcagagctgaggagctggagcaggaagtgcctcggcttcagaagaaaggaggactgatgagatgggagggggcaaagtggaggatgggggtccagcaaggaagccagcaggttggggatggcatggctaaaagggccaagaggaaggggcagactggagagccatgactaggtcaaagccaaatgcctttatgtaaacagaagtgtggggacctggactagaaccacaggaggggaaccgggagggagaggcgagaagagggacactctctgtgctgcaagaggagttaccccacccaagaacctgaacacaaacccacccagacacagacagcacatgtgcattcccgctgaaggatactgacttacagcccggggaccatatttggctgatagaagttttgctttgttttgttcctggcctgttcatttgtttttggtgaattagttgcaaatgtataaaaagcaaaagattttagattttacattttaaatgttggattcctggcttctcctgcaaaatgaaagaatctggccaccttaggcccccgttcccttgtaacactcgcctggagttggcaatcggggctcttaggcagatctagcctctccccgacaggtcccacctcagcccccttccctgcctggcatgtgtcattcctaatccacagcagaactgcatcattccttgtatacactgatggcctgagggcacatacactcagagccctaggcgcacaagccatgggctacagagaccaccaggtgcagagtggctcacatgctccggtgtgtctacgcacacatacatgcacacacacacgattctctgcattctcatgccggagtttattctccagtgcactgtggttcgttctctgtgtgtgtgtgtgtgtgtgtgtgtttgtgtgtgtgtgtgtgtgtaaatatgagcaaatgaagtgaggatgaatggaatgaatgaatgaatgaaactcaaagagcctcagtgcaggaagacatgtttttcaatctttctgaccttcttgtcaatatggactagcatcagacacctcctcttagcacatatagggcctttcatgtgagtacaaagctcttttccctttacagcccatttctatcactacgtctctctttccagagtctcaatttagtaaatgtttaccaagcacctactagctgttgagccatgtacccgacacttcatgcaggagtatctcatatcaccctcaccagccccacgatccggaattactgtctctatttcataaaacatggccaagatcccatggcatgtatgggagggtggaggacaggagttgaatgcagattccctaagaattattatcatgtacaaacctgcaaactcatacccctgtgctggtggcatcactccaccagccttccctggctctgcatccctcactcatagactcttcattttatccagctgtttatcagcaaccgtgagcaccttgagagcaggcataagtttgaattccatctgggtccccagcctgcgcccagactgcttttactttccagtgaatagacagaaaaaagagatgtgtttgttggttggctttttactcttagcaccaaaaacattttcctgagtgcccagccacaaacagggaccagcagtgggtgccacatgggtgctcagaagtggcccccacccacaccctcagcaccttccacccaactcagctcctggagtggcccaggaacccctttcccagactgatatattgatgcctccacaccctggaagaaatctggagctcccaaattctgggagcagagctctccttcatgctgcaggaacccaaaacttttttcttaggatgccacagtgagagggcagagaaaaatgaggattcctctcacccagagttaggacatctctctgtttcatgcccaggttcagagatattcaccagttacacaaaggccgtgcccaattaccctaacataagcagaaacacaccaactgacatagctgctcccgcccaccattcacaccccacgaccccaccagttactaatttcatctgcagtcagacaggtcctgaaaggaacactccagttccacacacactcccccagcagctgttcccacagcagtacccacagacacccagaagtcacgtagtgtgaccctcggatcttcgggccacgcgagtaccccgtcacacgcacacgcgcgtacacacacacacacacacacacacacacacacacaaagtgcccctgggagtgagacccaagccagatccaccaagacccgcaggggcccaataccccacccgccgcgcgcactgacacccggagagagggacgcacagcggctgtgggtgaagcttcacaaaacccagtcgatagacacacgcacgagttgtacacaaagccttggggcgcgcagatacgcacacgcaggtccacgctgttgtacccaaagttgcgcgcagaaagccccagcacgccggctgcccaccgcgcccgctcccgccggcccagtccacaccccctgctcctgcccttgcccacagacgcgggacccggaaggccgaaccggaccaggcggaggcccggggaggccgggtcccctggtcgcatgtccttcggcgggccgcgaggtcaggctcgccgtccttcgccgccactccccgcccccggccctcggcctcctgccgcccccagcggtcccctctccgcgtgcgtacctgtgccgggcctccctccccgcctcaccacgctggggcgaagggcgcccggccgccggcgggcgagggtgcgtcctctccggtgcccgtccgccttcctgcagccggcgtacgcctgcgggggtctcgcctgcgggggtctctctcctgcggcgcagcccggagggcgcgggcccggccgccaccgcctcgccctcccggtctcccgcccccttcccggcccggcccggagccactgccgaggcgcacgtacctactcgcgccgcgcggagctgtacggcggcggtggcggccgctggggaggcgggggggggatccggggacggagggacgggagaaggggcgggggccggggctcgccgagcgccgcggagggagctccgcccgcggccggcgagggcgcccggagagttagcaaggagagggacaggaaggcgggtgatgggctggggcgagggtgcgggggctccgatccaccgtcctcccctcccctccaggcagatctggatcgccggcgcctgggcttagggaactggggcttggagcccgcggtccacgggcgcaggggcggggcgggcgggggctgctgaagaagatccctccccaccaccggagagcccctattgcgccaagcgcaggtgcctccccactcctcacccccactctgccacttccccttccccccacccccaccccgcacgcagcccccaggtaggaccccgggtcctctccgaggtccttaggtcgggacggtctcctcgggcgcttgcggctccgtggctcaagggcgccacctgaaggctgcaagaaagaatccgacgatccccctcccccttttctctgcaatttttttctccgtgggacagtggagtgctccgcccaagaggggtgttctcctgggggcattgccaatggccaaacacaccctcaccctccaaggcccagctgtggggcctcttctcctggaacccctccctgggcacacacccacttaccccacgggcccctccatctgggctctccttttgcccgcactgtttgctcttgtctctgacggtcgtgattttgtttaagggtcagcctcctccatcggattggcagctcctggagagcaggacccatgtctgatcacctagaagacctaggtgggtgtgggtgaacaggctgtgaaaaggggtgactttcacttctttcctttacagggccggagttaagatgagtccagcgaagtgcctagagtaccaaattcatggagacgtttcctctttggggaacacacgccaaccccagagacagctttggtctgaatcgtgcaggttccgggaagacacggtgaccagctgaatcgtgtggtctcggttagtacctctggcctctgagcctgtatccacttctgtccatgaggattgtgaatgtgcaggctttgagggctctgggaaggccagcagaagttggccatgtggaaggacaggcgaatgagtgtgccatgtcctgctcctcggccacctcatgagcggagcctgacctgccctcctccaaagttctgtgcagccctccccaaccaggagactggaagtcaccctggatgatggatgcctgtgccttcaaggccagcatagcctagccctaggcaggtccaccagggctgggaaggcctccatttcctcccagccttgcagaggcctggcccgttgttagagacttcaaagggatgctagccctggcaccacactcctgttcaaatcccagctccacccccacagctgggtgccctggtgtaaaggactgccctcctggagctcggtttcctcctctgtgaaacggatgtaggaagtgttatgggaatgggatgagataccgcctttaaagcactcactgttccttccctcagtcatgcgctgtcctacctcagcctttgcgctggctgttccttctgcctgggacgtttttctttctgatatttcccgcactcacccccttccctcacttccttcaagtctttgctcaaatgccaccttctcagagacgccattccaggccatcctttcaaaaatagcagtgccccagcactctttactccctcactctgaatttttctctatagcacttaccaactgacattagtttctgtttgcttattgccacctcccctaaaaaataagtgccaaaagaagagggtttttgcctgtttccctccctgcagtatccccagacactagaaaaggggctaacacctaggaagctctggataagtgctcactgaataaagaacagagaaaatgggcaaatattatatactagttagctaggtagactccatccctacactcaggaagcttgtattctagtgggagaaaaggataagtaaatgtaacattgcagttatagtaaatgctaccaaataaaagtatagagtgcaagcctcaaacaagggtgccaacctagtcttggggataggaatggcttcctgtaaaagtgtggactgagctgagattagaaggatgagtagaaggcaaccagataaagaggggaggaaagagaagtccagcagagcgcctagcataggcgaagaccttggggtagaaggaagtgtgtgacgagtttgagagttgcaggagaccagtatggttgtcatggagggcctgataaggaacctggtaggagacgagcctgggcttagcaggtcaggtcactgcagagccttacaggccaagtaatttgttctttatcctcagagcagtggagagcctcactgatgaatgtaagtaaagggttaacaaaaccttttcctcttttgcatgagaatttgacctttggaagctctgtttcctggaaacagataaacatatgtctgctatgttactaagcaacattgcttctgataaaaatgacccctgaggaggaggctagaatgatccatgtggcaacagattagaattggagataccagaatgaactcatgtttagcttaatatagatgcagatgattacatacagaaagttatatatatatataatacacacacacacacacacacacacacacgggctagtatacacacatttatttccttactgtcaggcgagagggcctagaagcaatgatactccatagcaacaagcacacgtagcactgaaatcttggtttctaataccattctccaataaaaggatccaaggctccttgaagaaattgctgtttataggacttgggcaggaaacactacaagatgagcccagagcatctgatagtgccagaaagtaaagaaatgctacacacacacacacaccacacaccacacacacatgccacacacactctacacacactacacatacactacacacaccacacacactacacacacatgccacacacacactctacacacacactacacacaccacacacataccacatgcaccacacacaccacacgcactacacacacaccatacacacaatacacatactacacacacaccacacacatacactacctacacacaccacacacactacacacacaccacacacacacacaaatggtgggggtaggagctaactgaaagagttcccaatggccaaagctggaaaaatttgagtgacaaaataaataaggtaatattggactgtaacaaaaagtatgaaataaatatctatgagtccatactgataaaaataactgaacaaacaggtagaaaagagaaatctcccatgcagaattccaaattctgtatctagataactcagtccttgaggaggggaactgtaactccccattttgaaagtgcgaggtgcacataatgactccctttccaagagtgttttatggaaagcgctggggtggcggggcgggggcgggggcaggtgggaagtaactttacagtggagaaactgacaaacgtgatgacctcagccaggtgatgaaagtcaactccaacagtcaaatcacgtcgctagtaggtaccttggatatgatgcggcacaaatggcactttacctctgttgtcttcctccccaaaacccatagctgcagtctagtcatcagataaacatcagacaaatcccaatgaagaaaattctacaaaacatctgactagttctcctcaaaggtcatcaaaacaaggaaagtctgagaaattgtcacaaacgataggaacctaaaaagacataacgactcaatgtagtgtggtacccttgatagaatactggaacaggaaaaggaaattttgcaaaaactatggaaatataaataaagtatggactttagctaataacagtgtatcagtgttggttaattgtaacaaatatactcatgtaagatgttaacagtaggggaaagtgggtttggggttgatgtccttcggatgtttgtctcctccaaatctcatgttgaaatttgatccccagtggcagacttggggcctggtgggagatgtttgaatcatgggggtggatccctcatgaatggctctgtgctgtccccacggtaataagtgagttctcactctattcgttcactagagaactgattgttaaaacaagagcctggcactttcctcccctctccctcttgctccctctcttgccatgtgatgtctgctccccttctctttctgccatgattggaagcttcctgaagtcctcaccagaatcaggtgctaatgccatccttcttgtacaagcccacaaaaccatgaaccaaatattaataaacctattttcttcataaactacccagcctgaaatattcatttcttctccatccctccttctcctcctccttcttcttgttctttcttcttcttctccttcttcttctgttcttcttcttcttcttcttattcttcttcgtcttcttctcctcctcctccttctccttctccttcctcttcctcttcctcttctcccactcctcctcctcctccttcttcttcttcttcttcttcttcttcttcttcttcttcttcttcttcttcttcttcttcttcttcttctccttctcctcctcctcctcctcctccttctccttctcattcctcttcctcttcctcttctcccactccttcttcttcttcagagatgggggcctcattctgtcatccaggctggagtgcaccagcactatcatagctcactgcagcttcaaactcccaggcttaaacgatccttccacctcagcctcctgagtagctgggactaggtgtgcacaaccaagccaggctaatttttttcttttgttggtagagacagggtctcactatgttgtccaggctggtcttgagctcctgggctcaagcaattttcctcctcagtctcccaaagtgctggaattacaggcatgagccgcagtgctctgcctaggtattcttttatagcaacactaaacagactaagacagcgatatatgggaactctctgtatcatcttcccatttttgctgtaaatctaaaactgttctaaaaaatatatataagttgttgttgatgatgcttttaaacacccctgagagataacttgcgtctgggctggagggaactataaatatctggtgggaagtcatacttttggtgtcctaaatatagtgattcatgtaactggacaggtccaaaggcattggctcctgtgggacatgaaacttttaagccaggatcgttcctgcacccacctgatggggatttcatctggcatctgagtggtactgctctgccggaagaggcaaagattcctgccaagaagagcattgcgtgctgtgctagcaagtggaagttcctgagctgtatccttcagagtaggtcaatgccaagtgtggcttatggtcagccgctgagcctgagtgtgtattgaacctaagaagactcccttgtggacatggcagtgggtgataagcaagggagtgatgtgagtagatttgcactgtgaaaacattctccctctggttactcccaggtgcaaggggacaagagagaaaaacagaccatgtgggagattatcatggtcatgttggcacacagaaagtcctcaatcagatagctgtaattatgtatctgtggagatgtgtgatctgtgagacagaatgaggacttcctataggaacattaggagaaacacttagtctgcaatattccaaaaggtagtggtatataacataattttaggtgttaagtaaataaagatgttttgattatctatcactgcataacaaaccaccccaaaacagcagcttaaaagaaaattattatttattttctcacagttttgcagtttgggttgctctcagctgagatagctcagctcttgtctgtatggcgtcagctggggtggcacaaacagctgggagctggcgtagacttgactgtgtgtctatgggcttggttctcactgtcagctgggttttttcattctctcctacatgatctctccatgtagctagcgtaggcttccttacataatagtggtctcaaggtagtcagagttcttacatggcaggcaactttccccagagcacaaaagaaaaagctgctggatcatcttaaaactgaggcttggaactggcctggcattgcttctgctgcattctattgcttagtgcaggtcatgggccagcctggattcaaggggaggggtctatataaggatatgaataccaggaggcatgtgtcattgggggcaactagagtaacactcccccatcagctacactacatttatctctgtacctatatacacacatatctatatgtgtttattcatttcaatgactgtttattttaaattgttttagaaaatatataactagcggctgggcgcggtggctcacgcctgcaatcccagcactttgggaggtcaaggctggcagatcacgaggtcaggagatcaagaccatcctggctaacatggtgaaaccccatctctactaaaaatgcagaaaaaattagccgggcgtggtggcgggcgcctgtagtcccagctactctggaggctgaggccggagaatggcatgaacccaggaggcggagcttgcagtgagccgagatggcgccactgcactccagcctgggtgacagagcgagactccgtctcaaaaaaaaaaaggaaatatataagtaactcatgaaaccaaagatatcatgggtgatattgactagagtaagggcagaaaaatgagtctatatgaagttgatgcaataaagtctgctggtttcttccagtattcactcactctttcttccaccgtaatagaagccttgatcaatagtgggtacagtgcaccagaaggatttcatttcccagctttccttacagctaggtatggccaagtggatggtaagccattaggatatgagaggaggtagtgtgggaaaaatgcgttaagtctcctgaaaggaaaggaatgtgccctcctactctctttttgtccttcttgctgccaggatgcaaaaccaatggctggaacttgagcaaccatcttggaccatgaagtggaagcctattaggttggaagagcagcaaaattgaaggaacctagattgcagatgactagatggaaacaccagaatgggatagttcctcatacttttgtggatgagagaaacaaacatctattttgtataagctactattacttgggattttctgtcactcagaagaactaagtcaatcaaagtagaatcaggctgggtgcagtggctcacccctgtaatcccagcactttgggaggccaaggcaggtggatcacccaaggtcaggagtttgagaccagcctggccaacgtggtgaaaccctgtctctgctaaaaatacaaaaattagctgggtgtggtggcgtgcacctgtagtcccagctactcaggtggctgtggcaggagaactgtttgaacccgggaggcggaggttgcagtgagccgagatcgtgccattgtactccagcctgggtgacaagagcaaaactcagtctcaaaaaaaacaaaaaaaaaacaaaaaacagtagaatcagtaggcaaaaactgaataggtatatgaatagctgaagattgagaaatacagatgcaatctgatcccttgtgttccaggtaagaaatctctgaagccagcctgtagtatgtccaggaggattatatgaaagaagtaataacccaagggagactgaggtttttctaggtgaagggagtgagtggagcaacgaaaagttcctggaaaaggaaacaacacttaagcccagagatgaagtaatagtagcaaattatttgtgtgtttattttatttgacaaacacttacataacccttcccataggcgaggcacatgtttttacaaatattaactcactcaatcatcttaaccacctgatcatgtggatactattattgcccccattttaagatgaggaaatcaaggcacagaatagctaataactctgtgtccaaagttacacaactgttgtctcatggtttggggattcagaaccagacctcagcccagtgcttgtaaccactctgctggctttcatcgtaattttcaaagcactcacaaaagtcttgagaggctgttactatcatctccattttcacatttgggaaatttgagtgccaaggagaaaggagattatcttaccgctacactaaggaagcaaaattccaatcagacccaagggcccctgacttccaggttgatttagggacctcagatagacctaaagtcctggggctgatcagccccatgcctaatcacccataccccactccgttttcacctttctcagaatctggctgggatctggtgtttgggtttgtttacttgtgtcatatttacccctggcaccagcctggctcatctggttttcctggagctctaatactttcatggagtggcgctgatatcgtggcaatgggacatggttcagggatttcaagaaattaattggtggtcatgttccaggccctggaaggagtgtccacattcacactcacatgcacacaaatcttcagccggcctggctggcattctgcctccctttccacctggtctgtatggatctcccagccttggggaataaaagtcttgagtgttgtgttctctctctgctgtggaaagagtaaggggggaggcgaggaaaaacagaaatcaagatccataatcctagcttctacaagagtgagtgcccctacctagcagctccttgagggcaaatgtcttattgtctctcatccatgtgccagcacagggcctagcacactgggagtgctgggttaggtagattccaagccactcccctgggagagggcaggcccagggagaaaggaggagccaccgtgatggaggttgtttgatggtgcaccttctgtgtggcgatccctgcacctggtccctctgcattctgacaggtcagtaacctggagtttaatcaccatgggaggaaactggggtcagatcagtcaggctacctgccacagagtcacactcaaggctagttgaggccaagggatgctcttctgtccgtcctattctgcttcaccagagtctccaccatctcaccagggtcaagggctgccctccatacaacagaagattgcaggatggtgtcctagatacaccagcatgagacaggtgtgtataggacacaggtgcagaacagagggtgagaatacccatgtccagaacactcctggatagatatgcacaggatagatatgtgcggaaaggggtgcagagtgctcatgtgtacaaggcacgtatggataggatactgttttcgtccctttttgctgctataacaaaatacccgagaccgggtaattataaagaacgtggctaggtgcagtggctcgttcctgtaatcccagtgctttgggaggccagggcaggaggactgcttgaacctaggaatttgatacagcctgggaaacatagagagaccccatctctacaaataaataaataaataagccaggcataatgatgtacacctatagtcccagttacctgggaggctaaggaggaaggatctcttgaacccaggcttttgaggctgtagtgagctgtgatcgcaccatggtactccagcctgggtgacagagaccttgtctcaaaaaaaaaaaagaacagaaatttggaggctggaacatccacaatcaagacaccaacattggcatctgataaaggctgctttgtttcccagatggtgcctcattgctgtgtcctcacatagcagaaagcagaaaggcaagaaagtgctcccttcagcctggtgcctttttatatgggtgctaattccattcatgaggtcagagtcctcatgaattgcctccgaaagaccacacttcttaatactgttgcattgtggattaggtttcaacatgggttttggaagggacactaacattcaaaccatagcatatgtgttgtgagttgagttccctcagatgtaggcccaagacaagaatttgagtgcaagtggtttatttggaaagtcatcccaggaagcacagcagaggaatgggaagtgagagcaagaaggaagtgcatccaatacactacaggtgcattagtgagtccctgactgccatgagcaactggggctcagtcccattggactgagtactgttccacctgagatctgaggccacagagctctcactatttatccgccagcacctgtttgtcattgttgggggctattcctgcacttctagcctgtcctctgcacatgtcaagcatgttccttaagcagagtgagacctgcttacagtaggaagccgtaggcacgcatggagaaggtgagtgttgagggaatatgagtggggcccacagcgtttgctagaagacacagagtacagggcacgtgtgttcaggacccaaaaggacacagtacagggcacaggcagaagacaaatgattggattactggccttgcttgtctaggctaaaggaagagcctgctgaaaggaggtaaggagctgcagagagatggtaatgggccccctgagccaactggtgctctgtccccatgccccctctggttagagtgactgcatgtgcttgtgtggtaggaaaggcaggttgaagggttcgggagctctaacagtgcagacacttctctcttctagacctccacctcatctgtattttacaaaggggatgagggctcaggtgcccagaataggaggggaggcagcccaaaaggatgggaagagccctggactaggagttggacacaaaggcagagctaaatgtcatctccgagcccacttgccccatctgaggaatgggaatagctccaccctcgtgtctcagggcagattacctaccacacttgcatcttgttttccctgtctgcatagtgagggtcacagaactcctctctctcctatggacttcacagagagctattgtaaggagcagatatggtcatgaaaaagaaaacacttgaaagagggtaaaacacttaaatacacaggtggggggattatggaaaaggcttggaaggggaaattaggggacttggcttctgctctagctctgctgctatattgttaaaaaagacactcaaaataattgtgctttcaataaaacagaacttatttctctctcatggaaaaatctacttggcagctcaggctgacatgctggttcaccaaccacaagagacccgggctccttctgcattgttgctcggccatcttgcaccttgctgttccagctccagcccttgtcactacattgcatcagcagaaggaggatgtggggaagtaggaggcaccttcttccttcttcttaagggaagacattgaaccttaacctagaaattgaactcatcacttccatttgtatcctattgaccaggatttaatcacatggcacacttacctgcaaatgagtctgaaaaatgcagtcttttgccatatgtgaaagggagaagggatattgagggacagccagcaatttttgtcatagccactgactagcctcatttatgtattttataattttatacttatataaaattttatatatatgtttatttcttttgagactgttgcccagtgtgaggtgcagtggcttgatcttggctcactgcaacctccgcttcctgggttcaagcaattctcctgcctcagccttctgagtagctggaattacaggcacgcaccactatacctggctattttttgtgtttttagtagaggtggggtttcaccatatagcccaggctggtctcgaactcctgggctcaagcaatccacctgcctcagtctcccaaagtgctgggattacaggtgtaagccaccatgcctggccaaattgtatacacttttatataaaattatatttatataaaatacatgagcctgcttcccatatatgtatattatatatatttatatgtgtaaaatttatatatataaaatacacgagcccacttgccacatatatatatatgcaccaggcttgtggtataaagtaagattttgaaccagctgattgcgaatggaccctcttacttgcgggccacaagccctgagaggtcaagcgtgaggtctttctcgctcaccactgtgttcaaagcatgcattgcagagtctggcccagggaatccatagtagtattggctgcccatgggtgaagaatggctggccattctggctttcgtatttgctagtgacatttttccccactcaggggtttaagttctttccctttgcatgcctcctgtccccacctcccgtcatcgtcatgtgccaagcctttctgagcccatgaagtaaaatgtgctctgagccagaatcctaagagttggattaaaaataaatgaaaatgcatcaaaacaagttaaccacaagaaatggctttccagggtaattaggtgtcagcgctggaagccaaagacagagcgccagactctaactgccaagttccgctcctgtcagcaccactgctgtacagggcagagaacaccctaggcctagactgagcccctgcttgagtctccaccagttcaagacaacaggcaagaccctccccacgaaggtgagggaggatgggtcctaatctaggtccgtcacttattggctgaagtgatcctagggaaatccacgcctctctgagcctcagttttcacatccgtaataagttgtgaataataggatctatgtgtaatcgtctacaaaatgcagataatgatggtaccaacctcgtaggcagaggtccccaaactttatcaattcatgacacccttagcatcttagtaatttttcacagtgcaccaggccccctagaaggtgtagcagttgtttattaggcagttagcttcaaacgacataataatagttgttggcataatatctgacagacgtcattgcgtttccctcaaaattttaggtatgtttcagtgcctctgtgagttttctatagtgcctcagggtgcctcagtgcacagttttggaattgcagtcatcgggttttaaagatgaaatgaggttatgcatgtcaaggacttagtgtggtgcctggtctggaggaggagatcaataatgctggttgttctaaatcatccttcaagtcttatcctgagatcactttctctctagttctttgtgtgtctcctccgactgccacagtgacatctgtctgataccgagccaacaatacttccggcctcctgctcttgccacctcatggtctccacttgccaccttccctctgggcacctccaggcctgtggccccacttccacgcagtgctgtcttccggcacagaattgtgagtctcacttcatcatccctccataagtccacacacttgccaggatctctttgtagcggagcatacatccttgccccttagctttgggcttggccatgtgactaactttgcccaatggcacatggcaaaagcaacagtgtgacagttctgagctaagcctcaagaggcttcccatggttccacttgctctcttctcctttgccaagagaatgtgccccagcagccctgtgattccaggagaaggacaggagatctgtggagcagactcagagctgcagatctgcaaacatgagcaataataaatgattgttgtttgaaagtatggagttttagagacatttggtacacagtgttctagtggtaatccaacctcccaatctgtggcaaattcaacatgtctgagggaagatctgattggatcctctggtcaccacccaaaatgcagctgctcaaaaaccagtcacccatgagccaatgatcactctcctgtccagtctgtagatggctgctttgggctggggcactcatctcggctccaggcagttgtcccatgattacagggcatgtgacaaagcctggtggcctgtttgaaggaatcatctctggccccttgtgttcagaaggggtataaatgtggcagaaaggagtttctctgattctcttgggttctgaaaagtaacagctgaactacgagaaatagcacataagactttgtctgcatgtggcagtcagaacgattctcaagctgtaaacgccaggatataagaaatgtgacattccttacaactcgatttagtaactattttgagcctcattatgcctaagagggaaaagacgaggcccaagttcacacagacagtttggcagagctggagttagaacccagatatcctggctccttattacaatatcccttttcctgcctcgtcagtcttatacttggaaggaactccaggtcccatctccaagccagtagagcccctactccagtctctttgatcatctgggctatgcttctgccctccattgactgagcacccactgcttggaaaaattctaaacaacaccttcctcctactgaatcccagtctgcttccctttgtcctatacccactgtataggacaaaggtagtgatgtacagctaccgctgtagtgatgcaggtgaaccctaaaattggggctcagtcaggggaggttcttggcttcataaaggaaagaattcaagagtgagccaacaaagtaaagtgaaagcaaagcaagtttattagagcaacagagtacaggaaatgactgctccatagacagagcagggctaccccatcagcacagtagcctttgtggattgctggctgactatattaatagctactttttattatatgctaaataaagggtagattattcacaaattttcaagaaaagaggtggggtattccccagactgggggttcctccccttttaaaccatgtaaggtaagtttcaggcattgtcatggcatttgtaaactgtcgtggtaccggtgggagtgtcttttagcatcctaatgaattataattaacattccgtgaggaatgagggcaactagaggttgctttcattgccatctcgatcttagttggttttggctgcctacttcatggcatcctgtttgaacagatcctgttttgatcagtggagttgtgactgggattgtaaccagtgctcggagaacaagtcttgctgatctcctacctcactagctctgtcttctggtgctacaataaatatacactcttttctctttaacttataaacacttactgtaattttaagttctataaattctattgcattctttttcaaatctgcctgttaaaaagtgtctcttttggccgggcacagtggctcatgcctgcaatcccagcactttgggaggctgaggcaggtggatcacttgaggtcaggagtttgagatcagcctggccaacatggtgacaccccatctctactaaaaatacaaaaattaattggatgtggtggtaggtgcctataattccagctacttgagaggctgaggcaggagaattgcttgaacctgggaggcagaggctgcagtgagccgagattgcaccattgcactccagcctgggtgacaagagtgaaactccttctcaaaaaaagaaaaagaaaaaagtgtctctttttttgtatgattttgattccttcttgtatgcctcttcttttcaaaatacttttcttttgagacagggtggagtgcagtggtgcaatcaaagctcactacggcctcgacctcttgggctcaagcaatccttctgactcagcctcctgagaagctggtactacaggcacgtgccaccacacctggctaattattgtattttattttgtttagataaggggtcttgctatgttgcccaggctggtctcaaactcctggcctcaagtagtcctcctgcattggcctctcaaaatgttcggattacaggtgtgagccaccatacctggcctcaaaatacttttaattatcttcatctgaagttcttgggggaagggggtgaatggtgtctgttgactctcatttatggtgaatggcttccttgtgtgttcttatatgagttcatcttcaggggagctctatctgaggatattttgtgtagccagattgagggcaagtttccctaaactcggctgagtttgctttgccagtcatttcacatctttatctggggtcactatgctaattcttggtttggagtttctagtgcatgtgaatagaataaatttatatatatacatttgcagtctcagttcactgcaacctccgcctcctgggttcaagaaattctcctgctccagcctcctgagtagctgggattacaggcgcccacaaccacacccggctaatttttgtatttttagtagagacggggtttcaccatgtttagccaggctggtctcgaactcctggcctcaggtgatccgcccacctcggcctcccaaagtgctggtattacaggcgtgagccatcacgcctgcccaataaatttatattttaaaagacctatgtgagaatagagtctacatattttcatcgtagcattaatttgattgtttgtttccaatgactactaggatgtcagctccaggaaagcagggcctttgtttctctgattttggttgataaccccagtgtctagagcagaactcggcacacagtagacattcaataagtgtttagcgaaagagagaattgaatacctgcttcacggtgtgatgatgtcagtggcatttgaaccagagtaactccatcttgaataggggctgggtaaaatgaggatgagacccactgggctgcattcccagatggttaaggcattctaagtcacaggatgagatcaacacaagatacaggtcgtaaagaccttgctgataaaacaattgcagtaaagaaagtggctaaatctcaccaaaaccaagatggccacaagagtgacctctggtcatcctcactgctacactcccaccagcgccatgacaggttacagatgcgatgacaacatcaggaagttaccctatatggtctaaaaaggggagacatgaataatctaccccttgtttagcagatcatcaaaaaataaccataaaaatgggcaaccagcagccctcaaggctgctttatctatggagtagccattcttttattcctttactttcctaataaacttgctttcattttactgtatggactccccctgaattctttattgcatgagatccaagaaccctcccttggggtctgggttgggacccctttcctataacaatgggaagaataaatggtgtgtcaggactgtgtttgcctgcaagtagcagagtgttccattagacatcgggtctgttttctcatatagatgctgttgccgagtcaggggtgcaatgatttctaatggctctgtgattttcttgggctttgtcttatggtcgcaagacagttaccatagctccagacattacatccacattcaaggcagaaggaaaagggagaaagtaggagtaaaagggaagcagcagtgacattttcccttttgttaggaaggtaaaagtttttctggaagcctaacagcaaattgctgctttgatctcatttgctggaaatgggtcacatggggattccagaaacaaggaaacttggaaagtgagcatttcctttatctggactctatagataagtaaatgaggacagggacttgggacacccgtggaggtatatgccaaatgagacatatacatagtttatatgtaaagcacaaagcaaacccttagaaaagagtgcctattttcataataaccatattgttgccatttaaagctttgcattctctgtgatcctgttggcatcacatattcttggcttctggaacagcaggctccaaggtactcggacccataatggtctccctcccttcctccttgttctgttcagagcactaaagccctttaaaaaaaaaaaaaaagccagattacatttttcaatgtgagctacttcctgctctcattaactccatcttcagtgatttggccagaacctgctgccagtctgaaagagttgggggaatgtacaagtcaaagatccctcgggcccagaaccaggtcagtgtcaaggtcactcctaagaacactgagatgaaaatagcagaagagcccagcccgagtcttgggcagaccttggagtggctgagaaaggagctggtaaggttttgcattgcttttccttgatgccccgactacatattttccaaagatctctggttttccttcccgggtcccccctggggcagaggctgcaggctacggtatggaccctgcagtctcccctctgggacctaccacacaatgcacaattgtgatctcaggttcagggataagtaggtcgtggcctatatgggaggtgctgggtgtggtgctggccagactggttttagaatgacactgagtcctccgtgtgtgctgagtcctctgtgtggctctagcaggggatttatctctttgagcctcagtttccttatcacaaaatgggaataacaatagtaccaatatcatatggggtattgtaaggattcactgaagagatgcttgtaatcctcttaatgaatacttggcaccgtggtgctggctattataaccctgacccagatggacatgcgtacacccaatgtcttagcctgggtcccctagaaagcagaggcttggacaaggattgagaaactagcactttatttggaagtacaagccaagggtggtgatagggaggaacatagggtgtggcagcagaggccaatgctatgccaggcaattacgccagacattgtattaccaagcagcctacggcttcagaagttgccttaaggaggcccagtgggtgtctcagcagctgagatgctctgcaggggttgaaggaggaactgcacattgggggagagagaacgagaggaaattcatctgcccagctcgttcctgtctctcatttcccattggcaagggcctcccccatggagcactaactctcctgacccgatgttatgttacttggtcctgtggttgctgctcaggaagccaggcttatgcctttcattatggtattttctccaagtccgaaaaaagaggggtgcccccaagtgtgtggggacaccagccaggagagaggaggcagctcagggaacctcagaagaggtttgtttctcaatatacacacctctcatcctggggagagacagacaggattgtccaaaaatgacctttctgggttgccaggcaacaggccagctgggacccaaccctgtcatcaccccagaggaagggctgacccagtagggtttctcatgggaccagggaattccagcagcagggactgcagcttcccacagtcagcaggcatccagcactgggcagctgtcttccttatgctccctgaaactgtgggtgcctggatgcctcatcaccacctccgtgctgggaaccccactgtggtcttgtaggcgcatacccagaaatatgtgcaggaggaaaaccctaaaatcgagaaaacacagagtgaatgttttctgaggaattaggaaaaaatgggcccaggaccactcgctctgcagcctgagtcgtcccagtgttctgagggaggccgactacacctttgcttcacgtctttcctttttttttttttttttgagatgaagcctcactctgtcgcccaggctggagtgtagtggcacgatctcggctcactacaacctccgcctcctgggttcaagtgattcccctgcctcggcctccctagtagctgggattacaggcgcatgccaccacggctggctaatttttttgtatttttagtagagaccgggtttcaccatgttggccaggctggtcttgaactcctgacctcaggcaatctgcccacctcggcctctcaaagtgctgggattacaggtgggagccactgggcctggcctcacatctctctttctagctacatattctcttggcagtgttactcatgcttgagtagaggatgcagacttggtcttcttacttgtaatcagcttgtcacaaaaatgaaaacactatttttagtggggaaataatgttcataagtatctcttgcaaagagagacagagaaagagagaggctgagaatctgtatatctaaccatgtgttgccccgaccagctttggaaggaaaaacagaagcatttgcagtggctgcctctggagaaggacgcttgagttgagggataaagtgaggtgggtgggagagacttttaaatatatgtccttttgtagcttttaaattttctatcatgtgttaagaattacttagtcaaaaaatagaattttaacatttttaaagagaaagcgaactttgggagctgagttgagaggatcgcgtgagcccaggagtctgagaccagcctgggcaacatggcaagacattgcctctacaaaaaatagccgggcatggtggtgtgcacctggagtcccagctactcgggaggctgaggtgggaggatcagttgaacccaggagctcgaggctgcagtgagccgttattgcaccactgcactccagcctgggcaacacagtgagaccccgcctcaaaaataaataaataaataaataaacagaaagaaaaagagagaaaatgtatgggaaaaaattctcaggaaaaaatgggagaaagaatggagatggctgaagatgacaggagagttctaatgcagcagttctcaaacttttgggtcttaggaaccctttatgccccaaaaaattattaaggccaccaaaaagcttttgtttacgtgagttatatataacaatactgactgaattagaagccaaagctgagacatttttaatatatttactaatgcattctaaaataataacaaattcataatatgttaataaaacattacttattcaaaataactatatttttcaaagcaaatatttagtgggaagagtagccccattttacattgttgcaaattgctttaatgtctgtcttaatagaacacagctggattctcatagctgcttcctgcattcagtctgttgagacattacatgtcattagcttctggaaaactccatggtatgctcataagaaaatgaaagcaaaaaaaggaaaataacgtcttactattgtaaccaaagtagttttgacctcgctgaccccttgaaaggattttcccatgggcaaattcattcagtcctcatgaaagccttgaaaagtaagcaatttgctttctgctttgcagagcaagaaactgaggcattggtggatacggcttctgtgaggctgtgcgaatcacaagtgggctggtctccgatgagacagcgagggaaggggcttgatggggaaacatccagggctccacgcatcccctcacaggctccttctctctcctagtctgagatgcagattcaagatcagagtctcctgctcacactgaggcatcttcacagtgtcctggaggagctgcgtgcggacagcgcccactgggaggacgccaggtccagcggagggacatcccccatcagagctcgagcgggctccgaaggcaggggctgccagccggtttgctcaaggggtctggcccagctcctccgaggggaagacagcagacgaagctctctcccttaactggacggagatgacactgggctttaacactctccccattagtctaacctttcactgtgatatttcaggggcagagtgttggaatgggagtcagaaagccagggctctgggttcatttctgccctcatctgctgtgcatccctggatctgtcactcagcttctctgtgtctctggttccttttctgtcacttgggatttcttggtgaggcacacataaggtattggatgtgaacacacttttcgactgaaaacacaaatgtgctctagtgctctggcaagcaccatggcagtaaccctatccttgggaatttttcacaaggcaattgttaaaacaaagaactagatgtgcagtaatggttaccaagtgttgctatggtgaaaattccaacccctgtgtagtgacttagtggctgttttctgtcttcccaggaagccttcccattccccttcatctgataacatattaggccctgtaaccaccctggccataggcatgggtatattaccaggcctggccaatgatataattcatggttgccctaaaaagatgattggcccaatggatggtcatgtgaaccaacagagccagtcaccgaccttccctgagattgctacctggaagctctttctattacactcaggctgaggctgctggtggccatgttcctaccaggtaaagaagacctgtctgcagtaggaaggaaagaggctaatctccaaagagaagtagagagagggccacacaacagatggacagagaggaagagcgctggctctttttggtccctggttttaggtcctagttttgtgagttactcctgcattctttccagggaccgaagccagtcaatttcaccccccaacacagccacacacatcaatttgtttttggttaagctgatttgagcagtttccctcatttgcagctagaatggtcttgaggaatatgatccagatgttcaaagaatcaaagaggagaaatcaatatgaaaatggcatttcattcaatgagggtttgtgacaacaacctccgtaacagcaggcaaccaggcttgtgatacagcagagacactcagttgtgtggggtgctgcagtcataactgaaaaattgtatctgcctataagaaagactaaaacagaaaaggtgaaaataaaaaagtcatggtgttaagatggtctgatgatcggtagccctttttgtttttgaaaatctacctgtatgttgctagaacattgtttttatggctttgaaaaagtaaatcgattgcatgtagaggcagagtggagggggtgcattataagtataatgtttgtagtcagatcaacctgtgatttttgtatttggtaatataaatgatacctgctctgtgatgctggagctgggtccctgcaaagcaccttttggtgttaccagctgctccctgttagagtttgttaggctttgccaatatacagcatggagttagactacaagtctagaggagagaaaaggggcttgctccttcttcttgtttccctgtgggcttcctgttcctatgagcatctcccagcaatgtttcttcacaacaggcagcaattccttcatgaagcaccagacttctccaggatccaggttccagactcctggggccccttccaggagctcagagacatcagcttcagatgccagtccctcctcccctgaagtgtgggtccctgccttacctacctggccctttcctgagctcagagacaccagccccagctgagctgagttcctttctcagatagctgaatttaaactccagggaattcctcctgtaagttttaaagtttgatagtttctgcctcttttctttgttccctcagccctggagatggcagatgcttgctgcaattcctaccttaaagttctttttataacctttcagtcacccagttaacaactttatacctagttagcaattctttatattaaattttctgtgttaaaataactggtgtggtttctgtctcctacctgtcccagactgacacagctttttgctattattaccaattgccactgtaaccattcttggttacactggaaaggctaatgaatggcaccttattattgctgcatgattatgttctgatttgtgaaactatgactattacaaatggacaagctgattagccactattatcttgagagacatctgcctggccatgcaaagtagaaatgacattgctctcccatgcccgatgctaatcactagcaccctctgcctctccctgatttccacatttgggcccaaagaccaaaaacccctgccaacccctccatctccaatctgggaagatagacctagagctccagaacctgcccttctggtgggatatttgttgttctccaagaccctacatttggaaccaacgttcacttcctgatcctaggtcagagaaagccaaagctgagcccagatgctggacaaggagttgggatggaaattacatcttcagcgttggtcctagaggtctgggtgggaaatcatggccatgcaggacagtgagcaccagagggagcatgtggatcatggtctcaggaaaacccagggttttctctgctaaggcagcaaaaacaggactgcacacctaagcctagcatccaggatgaagagaggaggggacagagatggaaaaaggattcatgaggtcagaagctaaaaatttaggagcaagaacagttcaagatgtgaaacctagagtgagtcagggcaggcaaggcagggcttacttacactgtgactgattagaaatgatctaatctctcacacctttacatgagagccagcttccagtcctgggtcagctgtgacaccttacagagcccatgtgttgtggtgtatattgatgtgtaacaaactgcctccaaacttaaacacagcaatccctttattattgcaacagccatttattattgttgtaaattatgtttcccatagttctgggctcagctgagcggttcttggctttgggtctctccaatgattgcagtcaggtggtggctgcagctcgatttatctcaaaggcttatttgttgccctctggcaggtgatgctggcctcagctgaggctgtaagatggaatgcctatacatgaccctccaggtggctgggcttcctcacagcactgtgtcaagggttgggctttactttccagtctttctgcatcttttcaggtccactcccactgctaaagattttactctcctgctatttctttaagtcgcagtttatagagagggaatctgattggtcagcttaacttttgacacctggacatatcataggttattggtataaaggaggtttatttttgtcttccacttcttcctccttcttcttccgtctcttctccctctttctccttttcctcttcattatcatcatcctcatcatgatcatcatacataggtaattaaaagggaggactttgacatcaggctgcctaggtttgaataccagatctgcatcttatcagctctctaaccttgggcatatagcataacttttctgtgcttcagtttgttcttctataaagtggggataataacagaaattacctcataggactattgagcaaatgcaatgagtcaacatgttcctggaacataagcagtgctcagtaaatcttagcaattattattaataatgacagctaccattttattttattttactttaagttctgggatacaagtacagaacatgtaggtttgttacataggtatacatgtgccatggtggtgtactgcacctatcaacccgtcatctcggttttaagccctgcgtgcattagttatttgtcctaatactctccctccccttgccccccacccctgactggctctggtatatgttgttcccctcccctgtgtccatgtgttctcattgttcaactcccagttatgaatgagaacatgcagtgtttggttttctgttcctgtgttagtttgctgaggatgatggcttctagcttcatccatgtccctgcaaagaacatgatctcattcgattttatggttgcatagcactccactgtatatatgtaccacattttctttattgtgcatttgggttggttccattgatgtgcatttgggttggttccatgtctttgctattgtaaatagtgccgcaatggacagctacctttttttttttgagatggagtttcgctgttgttgcccaggctggtgtgcaatggcatgatctcagctcaccgcaacctccacctcccgtgtttaagcgattctcctgcctctgcctcccaggtagctgggattacaggcgtgcgccaccacacccagctgattttgtatttttagtagagacggggtttctccatgttggtcagactggtttcgaattcccgaccgcaggtgatctgcctgccttggcctcccaaagtgctgggattacaggcctgagccactgcgcctggccaacagctaccatttttaaagtcaggatagtttagtgatcgtaagtacagcctggagcctcactgcctgtgtccaaatcccagctctacaatatactgattgtgtgcccttgggcaagtcattaaactctctatgccttgattttatcatccgtagaatggggataatagtattgcctatctcctggggtttttgtgaggaataaatgagtaaatccatggaaaacacaaccgtgcttgtcatctaacaacaactatgtgtcatgtaaactattcattatcattagtaatcatctgccctaaataccagcaccacacacggcgctgtaaagatcttagtgcactgaacacactcaacatctctgcaagggtgatattaaatctccactttatggatgaaggaactgaagtttagtggagctaagttgccccccaaaaaagcacaatgagtaaatggcagcagtggcattgaatctcaggcctgtcttctgtctaagcagggctcttactattatatgatgttgctcttctgatcagccacagtgggggagtggtgccatgaagagaggaagcagtgatgtcaggctcataggatccctgctccctccttctggcagggtctggggcaagacagtctctaatgtgtgtgaaggcaactctaggacaacacctctgttatctctccagtaagtaggcagacacagaatctggtgatcccagtaatgcacacccatccctgctcccagcatatcttgaggcccagttctctcctgtctctgccaccctgctttgttttgcccaaaccctccccaggtcatggggacagctcctatttcactgggctgaggtcagtttcactggatcaaaatcaaggtgttggccagactgtactccctgctgactctaagagagaattccttccttgcctcttccagtttctcgtggctgctggcagtccttgacttaggctgcataacttcagtttctgtctctgtcttctcatagccttttgctctgtgagtgttaaatctccctctgtctacctcttataaggaatcacatgattgcatttagggcccacctggataacccaggataatctccgcatgtcaagattcttaacttaatcacatctctaaagactttcacctgcctttctttccatataaggtaacatataaggattaggatgcggagagggaatttccctctcattccttctggaaagcattctctggccaatgtgcagggctaagaagaatctcacatagctgcagattaccttggtcgctgtcagaagaagaacttatgtttgttgaacacctacaatgcacaggcattgtaacagacctgaccagtgagtacgtgttaatatttccattcgacagcggagaaaactgtgacccaaggaagcaaaagcaggacagttgcaaacagatgaaactgagggttcaaagttgggcttctgacaaacttgtttagatttcgtacgcgcgccatcgaagactacggtaattacgctgtgtgtggccgccacctagtgtccatacagagcaatccttccgtgaatcagcccgttccgggttgcaggactggctcactcaccatcagctttcccgttgtggcgcatcttactgggagggccatggccccagaggctttctggctccagagatctgcgtttgaactttagctctgccgttgacagagtgatctggggcctccttctctgatccttcacttatccttaactctaaagtaaaaatgacacctctcagagctgtggagaggatgttggaaagtgctttgtaacaaactgggaataactggagagaatggaaagaaacattgtctgcagttgaccaggcttggattcattttaaaaaatacttaatgtgcacctgctgtgtgtcaggcactgttctggatgtgggaatgtcgcaacaaataaaacagacaaaatttatgtttttgtgtagttaatagtccagcattccagtttttgagtcattcattcattcatttacaatatgtttctggcactcctgtgtgcagcactttcccaagcaatgggcacagagggtatctaatatggctggaacccaggaagccaggggaacaggatggagcaagtccagatttgtggggcctgaagtttatacgatttagggtatcaatcatataccctaagagaaagaatgcaaagtcagaaatacagaattaggctagaaagagttttttcttttataatgagagatgaaataaactttagctggcaaaaatcacaaaacataaaatctagaaaagtagcacaatattaactgcatgatatggctctataataatttttctctacatttttttctgtaacttctttgatcatctagtcatgataacaattttattattttattttcttcaaagagactgtggaaataattcagtctctcctctacaagattaattttttttgtgtgggtactttaaacaatttaaacattgtaaaaatgccatgtatatttttaggattattgtcaattttggggaagcctctatgttcctcttatatataagctgtaagccttcttgtaaagtgactaattttaaatggtatttgagtggatggtacattagccaatttattgttgctgtccctattgtaggggtgtattaggagttttacattttcttcctgtatgtcagtgtttcatgttaaataattgagaaattaaaactttcccaatgtatttatatgattcactccttttaattacttagattatcaaacaatctaagtctattaattacttttgttgccagaaaagggggtcttgatccagaccccaagagagggttcttggatctcacacgggaaggaattcaaggagagtcgcagagggcactgagaagaagtagttttagtgaaagctactcggttaccgagcagggcatcctcagaaagcaagaggagaaatacctcatctctaagtttttcttacagaggggacttatctatgtaaaggctaagatttgtctacatgctggtggactaacagcatgacaaaatttagcactttttgatttaaggaaagttatccttggcattttaatgtatacatccaacaaaatgactacaatcaaaaatgtccatcaagacaactataattatcttgaaagcacatattgttatggatactggaacatctggactttccgttgttgtaggagtgcgtccttgcaggtatctttaagttgttttctcaactgtaaacgtcttatgaacatgggtcatgactggcaaggaatgggtcttgcttgtttcacgatggagtcaattttaaaatggtgtaaccctggctctcctatgctcctgtttccctgacactttggtttgaaatgtatctatttctcttaatgaatcactacttttgttatgatctgcaggctagttcatctgtaaacacctgacatcgggaaggcagagatggccaaagaagacatgagccaatacaatgagatcataaacatgcagcttcacacatggatgtactagctgtttacagcactgctgcatgtttgtgctctatgaacaccagactctgatatcttctagtttgcgcaattcctattagaaatgaagaaaaaatgtgcagtgcatttataattgcacatgttgtgttgtcagatagatttcaggtagacagatagacaggaaagaacttctgctttaactgggctttgatgagaattaaatcctctgcttatagtttaatatgtctgatgattggaagaattctcgatagactagtttctgactctgtatgtttcaaattttgtttcttatccaatatatatgtactcctgacgctatgcattaaaacgatttatggccctgtaccttcatgtcacagtgcaggatgagtcagcatggtgggcgtagatgtgttcctggaagccattcctaactaagatagatagcaatgacttgactatagatcgaagtgactgtcaaccacataaattgatccctctgaacctgtattaaatgtacatgtaactcagctctgcgtcagccacacccctcagctactccattgccacccacacagtgacagacagagagttaaagtggaaagagacatccatcttcaaagattacggtaaaatatcttattttcgaaaacttaacaaaaacacacacccataggaaaatactgctgtgcttctcccagggctttggaggaggccttgcaagtgagggtcctgaaactgaagattcctaattgttaaggtaaatccacccacgtgaaatgaagccagaattacaagtaagggggagaccatgtagggccctgtagttgttaggaggaagtttcagtgttattctaagaacaacaggaaggcttaaaaggctttaaaagggaaacccgctggttgtgggcggaggattacctaggtgccgaggcaagagactgaaggcacaaactatttcagtataataaagaaaatagtcagaataagaatagtcataatacaaattagacatagagatgatcatgaacaattaccaatcattattataaacattattaatcattagcttttaatattactctttgctgcattactaatataacctaggaataaccagtgggtatagggtcaggtgctgaagggacattgtaagaagtgacctagaaggcaagaggtgagccttctgtcatgcccgcataagggccgcttgagggctccttggtcaagcggtaacgccagtgtctgggaaggcacccgttacttagcagaccgcgaaagggagtctcctttccttggaggagtcagggaacactctgcttcacctgcttcttgtggaaggctggatattatccaggcgggcccgcagtcatccggaggcctaaacccctccctgtggtgctgtgcttcaatggccacgctccttgtccactttcatgcttctcccacactcctggttcctctttgaagttcatagtagatagcagtagaataaatagtaaaagtcttaaagtctttgatctttcttataagtgcagagaagaaaacgctgacttatgctgccttctctctctgctttgactacctaaaagggaagggcagagccccctatcctgtaatcacgtgacttccttcaccttgtcaatcactcagaagattcacccttctaatatggtggcgccaagatggctgaataggaacagctccagtctgcagctcccagcgtgagcgatgcagaagatgggtgacttctgcatttccaactgaggtactgggttcatctcactggggcttgccagacaagtgggtgcagcccacggagcagggcggggcattgcctcactcgggaagcacaaggggttggagaattccctttcctagcaaaaggaagccgtgacagacagcacctggaaaattgggacactcccaccctaatactgcgcctttccaacggccttagcaaactgcacactgggagattatatcccgcggctggctctgagggtcccacacccatggagcctcgctcactgctagcacaacagtctgagatcaaactgcaaggtggcagcgaggctgggggaggggcgtctgccattgctgaggcttgagtaggtaaacaaagcggccaggaagcttgaactgagtggagcccactgcagctcaaggaggcctgcctgcctctgtagactccacctctaggggcagggcacagctgaacaaaaggcagcagaaacttctgcagacttaaacatccttgtctgacaactttaaagagaatagtggttctcccagcacggagtttgagatctgagaacggacagactgcctcctcaagtgagtccctgaccgcccagtaacctaactgggaggcacccccccagtatgggggcaactgacacctcgtaagaccgggtgcccctctgagctgaagcttccagaggaaggattaggcagcaacatttgctgttctgcagcctccgctggtgatacccaggcaaacagggtctggagtggacctccagcaaactccaacagacctgcagctgagggtcctgactgttagaaggaaaactaacaaacagaaaggacatgcacaccaaaaccccacctgtacgtcaccatcattaaagaccaaaggtagataaaaccacaaagatggggagaaaccagagcagaaaagctgaaaattctaaaaatcagagcgcctcttctcctccaaaagaacacagctcctcgccagcaatggaacaaagctggatggagaatgactttgacgagtcaagagaagaaggctgcagatgatcggtaataagaaacttctccaagctaaaggaggatgttcaaacccattgcaaggaagctaaaaaccttgaaaaaagagtagacgaatggctaactacaataaacagtatagagaagtccttaaatgaactgatggagctgaaaactgtggcatgagaactacgtgacacatacacaagcttcagtagccgatttgatcaaatggaagaaagggtatcagtgattgaagatcaaatgaatgaaatgaagcgagaagagaagtttagagaaaaaagagtaaaaagaaatgaacaaagcctccaagaaatgtgggactacgtgaaaagaccaaatctacatctgattggtgtacctgaaagtgacggagagaatggaaccaagttggaaaacactcttcaggatatcatccaggagaacttccccaacctagcaaggcaggccaacattcaaattcaggaaatacagagaacgccacaaagagactcctcgagaagagcaactccaagacacataattgtcagattcaccaaagttgaaatgaaggaaaaaatgttaagggcagccagagagaaaggtcgggttacccacaaagggaagcccatcagactaacagcggatctctcagcagaaactctacaagccagaagagagtggaggccaatattcaacattcttaaagaaaacaattttcaacccagaatttcatatccagccaaactaagcttcataagtgatggagaaataaaatacttcacagacaaacaaatgctgagagattttgtcaccaccaggcctgccttacaagagctcctgaaggaagcactaaacatggaaaggaacaaccggtaccagccactgcaaaaacatgacaaattgtaaagaccatcgacaccaggaagaaactgcatgaactaatgagcaaaataaccagctaacatcataatgacaggatcaaattcacacataacaatattaaccttaaatgtaaatgggctaaatgctccaattaaaagacgcagactggcaaattagataaagagtcaagacccatcagtgtgctgtattcaggagacccatctcacgtacagagacacacataggctcaaaataaagggatggaggaagatctaccaagcaaatggaaaacaaaaaaaagcagaggctgcaatcctagtctctgataaaacagactttaaaccaacaaagatcaaaagagacaaagaaggccattacataatggtaaagggatcaattcaacaagaagagctaactattctaaatatatatgcacccaatacaggagcacccagattcataaagctagtcctgagagacctacaaagagacttagactcccacacaataataatgggagactttaacaccctactgtcaacgttagacagatcaacgagacagaaagttaataaggacatccaggaattgaactcagctctacaccaagcagacctaatagacatctacagtactctccaccccaaaacaacagaatatacattcttctcagcaccacatcacacttattccaaaattgaccacatagttggaagtaaagcactcctcagcaaatgtaaaagaacagaaattataacgaactgtctctcagaccacagggcaatcaaactagaactcaggattaagaaactcactcaaaactgctcaactacatggaaactgaacaacctgctcctgaatgactactgggtacataacaaaatgaaggcagaaataaagatgtcctttgaaaccaatgagaacaaagacacaacataccagaatctgtgggacacatttaaagcagtgtgtagagggaaatgtatagcactaaatgcccacaagagaacgcaggagagatctaaaattgacaccctaacatcacaattaaaagaactagagaagcaagagcaaacacattcaaaagctagcagaagtcaagaaataactaagatcagagcagaactgaaggagatagagacactaaaaacccttcaaaaaaccaatgaatcctggtttttttaaaagatcaacaaaattgatagactgctagcaagactaataaagaagaaaagagagaagaatcaaatagatgcaattaaaaatgataaaggggatatcaccaccactcccacagaaatacaaactaccatcagagaatactataaacacctctatgcaaataaactagaaaatctagaagaaatggataaattcctggacacatacaccctcccaagactaaaccaggaagaagttgaatccctgaatagaccaataacaggttctgaaattgaggcagtaattaatagcctaccaaccaaaaaaagtccaggaccagacagattcacagccgaattctaccagaggtacaaagaggagctggttccattccttctgaaactattccaatcaatagaaaaagagggaatcctccctaattcattttatgaggtcaacatcatcctgataccaaagcctggcagagacacaacaaaaaaaagagaattttagactaatatccctgatgaacatcgatgcaaaaatcctcaataaaatattggcaaaccgaatccagcagcacatcaaaaagcttatccaccatgatcaagttggcttcatcccggagatgcaaggctggttcaacatatgcaaatcaataaatgtaatccatcatataaacagaacaaaagacaaaaaccacatgattatctcaatagatgcagaaaaggcctttgacaaaattcaatagcacttcatgctaaaaactctcaataaactaggtattgatgggacatatctcaaaataataagaactatttatgacagacccacagccaatataatactgaatgggcaaaaactggaagcattccctttgaaaactggcacaagacagggatgccctctctcaccactcctattcaacatagtgttggaagttctcgccagggcaatcaggcaagagaaagaaataaagggtattcaattaggaaaagaggaagtcaaattgtccctgtttgcagatgacatgattgtatatttagaaaaccccatcatctcagcccaaaacctccttaagctgataagcaacttcagcaaagtctcagaatacaaaatcaacgtgcgaaaatcacaaacattcctatacaccaataacagacaaacagagagccaaatcatgagtgagctcccattcacaattgcttcaaagagaataaaatacctaggaatccaacttacaagggatgtgaaggacctcttcaaggagaactacaaaccactgctcagcaaaataaaagaggacacaaacaaatgaaacattccatgcttatggataggaagaatcaatattgtgaaaatggccacactgcccaaggtaatttatagattcaatgccttccccatcaagctaccaatgactttctttctttttctttctttctctttctttctttctttctttctttctttctttctttctttctttctttctttcttctttctttctttctttttctttctctttctttctttccttccttccttccttctttctttctttttctttttttgatggagtctcgctctgttgcccaggctggagtgcagtggcgccatctcagttcactgcaagctccgcctcctgggttcacaccattctcctgcctcagcctcccgagtagctgggactacaggcgcccgccaccacgcctggctaattttttgtatttttaataaagacggggtttcaccatgttagccaggatggtctcaatctcctgaccttgtgatccacctgcttcggcctcccaaagtgctgggattacaggtgtgagccactgcgcccagcctgactttcttcacagaattggaaaaaactactttaaagttcacatggaaccaaaaaagagcccacattgccaagacaatcctaagccaaaagaacaaagctggaggcgtcacgctacctaacttcaaactatactacaaggctacagtaaccaaaacagcatggtactggtaccgaaacagagatatagaccaatggaacagaacagagccctcagaaataataccacacatctacaaccatctcatctttgacaaacctgacaaaaacaagaaatgaggaaaggattccctatttaataaatggtgctgggaaaactggctagccatatgtagaaagctgaaactgcatcccttccttacactttatacaaaaatcagttcaagatggattaaagacttaaatgttagacctaaaaccataaaaaccctagaagaaaacctaggcaataccattcaggacataggcatggacaaggacttcatgactaaaacaccaaaagccatggcaacaaaagccaaaattgacaaatgggatctaattaaactaaagagcttctgcacagcaaaagaaactaccatcagagtgaacaggcaacctacagaatgagaaaaaatttttacaatctacccatttgacaaagggctaatatccagaatctacaaagaacttaaacaaatttacaagaaaaaatcaaacaaccccatcaaaaagtgggcgaaggatatgaacagacacttctcaaaagaagacatttatgcagccaacagacacatgaaaaaatgctcatcatcactggccatcagagaaatgcaaatcaaaaccgcaatgagataccatctcacaccagttagaatggccatcattaaaaagtcagaaaacaacaggtgctagagaggatgtggagaaaggaacgcttttacaccgttggtaggactgtaaactagttcaaccattgtggaagacagtgtggcaattcctcagggatctagaactagaaataccatttgatcgagccataccattactgggcatacacccaaaggattataaatcatgctgctataaagacacatgcacacatatgtttattgcggcactattcacaatagcaaagacttggaaccaacccaaatgtccatcaatgatagactggattaagaaaatgtggtacatatacaccatggaatactatgcagccataaaaaggaagagttcatgtcctttatagggacatggatgaagctggaaaccatcattctgagcaaactatcgcaaggacagaaaaccaaacaccacatgttctcactcataggtgggaattgaacaatgagaacacatggacacagggtagggaacatcacacaccggggcctgctggggggtggggggaggggggagggatagcattaggagatatacctaatgtaggctgggcgaggtggctcacgcctgtaatcccagcactttgggaggccgaggccggtggatcacctgaggtcgggagttcaagaccagcctgaccaacagggagaaaccccgtctctatttaaaaaaaacacacaaaattaggtgggcgtcgtggcacatgcctgtaatcccagctactccggaggctgaggtaggagaatggcttgaacccaggaggcagaggttgctgtgagctgagattgcaccattgcactccagcctgggcaacaagagcgaaactccatctcaaaaaaaaaggagatatacctaatgtaaatgacaagttgatgggtgcagcacaccaacatggcacatacatacttacgtaacaaacctgcacgttgtgcacatgtaccctagaacttaaagtaaaattaaaaaaaaaaagaagaagattcacccttcttaccctgaccccttgtcttgtatgcaataaatatcagcaagcccagccattcggggccactaccagtctccgcatcttgatggtagtggtcgcccgggcccaactgttttctctttatctctttgtcttgtgtctttatttattacaatctctcctctccacacacggggagaacacccgctaagccctgtagggctggaccctacagctggtaataggatttgatctatattttgagacagagtctctctgttgcccaggctggagtgcaggggcgcaaacttggctcactgcaatctctgcctcctcggttcaagcgattttcctgcctcaacctcccgagtagctgggattacaggcacccaccaccactcctggctaatttttgtattttcagtggagacggggtttcgccgtgttggccaggctggtctggaactcctggcctcaggtgatccgcctgccttggcctcccaaagtgctgggattacaggcgtgagccaccacacctggccatgatctatatttttcaaagacccctctggcttcagtgtagagcagcagtctccaacctatttggcaccagggaccagttttgtggaagacaattattccacgagccgagtgggcggggggtcatgagattctcgtgaggagcgggcaacctagatccctcgcatgtgcagttcccaataggtttcgcgctcctgtgagaatctaatgcgcggctgatgtgacaggaggcgaagctcaggcggtgaggctccctcgtccactgttcacctcctgctgtgcggccctgttcccacccggggttgggaacccctggtgtagagaatgggctttagggaggtgagtgacaggaaggagaccgctcaggaggttggagcttttccaggagagaggtggcttagactagggtggagtcggtggagatcttgagaaggggtagatgaaagtcatatttgaaggtggagtgatgggcttgctgatgggctggcattgaagtagacatgagggtggcaccaagggtgtctcccagacatcctcttgaatggttgccgtgacatcatttcctgaggtcggaaattgggagctaaacttcaatttgaattcaatttgaatcctgtctctacaattcccaaccacgtgaccctagacaggttgctattttttctccagccctttccttattcaaaaggggaaaaccagtaactacttttgtgagattgtttgaagagtcaatgagacaacccatgaaaatgcccagccaggagcctgaaccttatcaataaccttatattggatgccattgccgctccaagatttattagtatttactatcaaactcaagagaggaaaccagccttgcatcctgatgctcttgcaggatttttctcaggttctagcacttggccttgactactgagaactgtgatattccaggctggaaaatatttgctgtccccaaagggcaggtcaatgtgaataatctttttaataataacaataataataatagctaatatttgtagagcacttattattgcttggctcttttcatggttcattttatttatttcttacaatatcctacggcgcgagtacttttattattttcactttacagatgagaaaatctgaggttcaagggattaaagaatttctccagtgacctccagctataagtggaagagaagagactggactgcatcatagggatgttcagagatcagccagaaagatcacctttcacaacaggactatggggcccaggccccatccctgtcatgcccctgctcaggtgtctcaggtccgagcgccaggacaaagccggagactgcgcactaggaccggtgcgccttgctcactgtctgactctatccctcctgccccgtccactgtccccaccaacgccctgcgccctcgtccctctcagtcccggtcctctccactctagcgcactgccctactctgtccgtacccccagccgccgccgccgccgccgcgcccagtccctcggtcgctggcccgcccttccccgccccctgcccccggtccctcagccactgccccgccccgcccgtccatacccctccacgcccctccccatgtcctgcccgtccctctccatcccctgcacgccccgcccctcgcccactgccccgccccatcccctgtcagtcccgtccatcgcccactgccccgccccgtctcctgcacgccccgccccgtcccctgcacgccccgccctcgcccactgccccgccccgtcccctgcacgccccgcccctcgcccactgctccgccccgtcccctgcacgccccgccctcgcccactgccccgccttctccacgccccgcccctccccgccccgcgcctgccgcgcattgcagacgcccagcggcgccaagaacccggccaagctgacttggcgactcctcgcagcccctgctctggcacgccacacctcagacgaggctttgaaagtagggcgcagcctgagaggccggccggaccccgagtgctgtaggcgggctgggagatgggggccgccgccacccacattcccacacgcacccggcgccggcgcctcacgccgtgttagctcgcggcgccaagcccggagggtcccgcctgaggaagaaaggtcgtcgcccgcagcccagctggggctggaggcgcgacccggggtctcctcgcccgcacgcggaagaaaatgggcgctgtggcctcagtttccctctgtgagcacccggcccggaactctgaggagtcgtctgtggaggagcctttggcgtccccctgcccctgagcgtggccgtcagctcttcccagcccctgcactttgctttcccctccctcacgcccggaagggtctcgccctgcccggctcagccctctctccccacgcccctctcccagggtccccgcccggtccccttccgaccccttcctccctcccttcgctccctccccgccaccgccgccaccctgccctttgcgggccggtttccacggagtggccccatcccggtggcttcacgttgcacgaagtcagttcaatctggagactgaaaaagcctccgggacgtggggcgggagggtgcggggggagtttgtgtgcgtattttgtggggaggggaaaaaggttaggtaatatgtgctcgggaaaatcaatgtctcaggaatagcaaatctcagggtttgggttttttctttgtttgttttctcttttaagaagtccatcacttaaaaagtacatttgatttttttgagacggagtcgccctctgtcgcccaggctggagtgcagtagggcgatcgcggctcattgcagcctccgtctcccgggttcgagcgattctcctgcctcagcctcccaagtagctgggattacagacgcccgccaccgtgcctggctactttttgtacttttagtagagacggggtttcaccatgttggccaggctggtctccagttcctggcatcaaagtgatccgcccgcctcagcctcccacagtgctgggattacaggcgtgagccactgcgccaggccaaaaagtacattttaaaagtacctcacaccactgggagccatttaaaaagataaataggaatttattccgagagagcgaaacacacagactaaaaaggaaagtagtggaaccagcgcaaggtacaagccatatgcattaaaatctccagctgccccgtaggggaacatggtttggcggattgcgtcacctttagttggggcataatgattgaattcttgcggtacaaatagacactgatggaagtttacctaagtttttaattctttcgccgactttgtgttcgtcttggctcagttttctcttttatcagtatcttaagtagaaaagaagcaaaaagaagcttccatagtggcagtgtaagattacttatatgtaagcaataatttgattcttccctagaagtcaaccaaagtgctataacatcccttctcatctttagcttagtgatagagccctatggtgttaccaagaatagtacagtttgtaaaaatgtgcattaattccttctctttgttttaagtgaaggttttcttttatcgttcttatttcaaaacatttaaatttgattcgtgtttcttcccttgccttctaattattttcttatagtttcttgttttcttcatttttccactttatggaatggaaactccactccactccactttttggagtcccgtgattttaacttcaaaaattaaaatattgttgaataaaccagagtatcttgaagagggcaatgaaattcaacacctgcgtataaatcaataatccaatccttcttaaattattaagttttagaaaagaggtgccctgtattagcttttcttggttttgtctaccttttcctattcttgtttcttatttccatatcttatattttcagccttcctcctttatttgaccatgttagtaagaagagaactcaaatccttttttggataaaataagtgacatgtatgaagaaatcattaatcaggatgcatttaagcccggtgtagaggtgtagttcacaatttactagagctttgtcattaggttataattttatattctaaataagtttctcttatttacaagagaataaattgtattgaataattgaattagaacataatctgaatgttattttgtagaattaatacatatttttcttatagcaataaaaagtttttgtaataaaattttaaatttcttttcgtgttctctctagtttgttaaatacaagtaaggaacacaggcaacatgttctacacacatgtgcttatgagtaaacgagggccattggccaaaatatggcttgcagctcactgggagaagaaactcacaaaggcccatgtatttgaatgtaatctagagataaccattgaaaaaattctttcacccaaggtatgttactgattaaaatgatagcttgtatttatcatgactttggaggaggaaagacattaagatacacttatatcatgaaatacattttcaaggaagttttacttgtcaaatggtctttcctttaattcctatagcatttagtgttataacaaacctattggtttctgttggtaattaactttttcatatgtctatcatagatagattggaccctaagggacaaaggccatattttatgcgtattcatattcctttcttattcactaacaaaatacagttgacatagtaagtacttaataagcatctcttagaaaataatgaacaaatggggaggatagaaagaggactggttataaatccaaaaatatgtgaaaatgtgtcataaacagtaaagtactatgttcattataaaacattaaaacagtgattagaatttgcattacagcatttaatattgttttaagttaagtatttttcaactttagagaaggacaaattgaaagcctatggtgtgttaggcactgggctggactttatgcctataagtctatttaatctttacaacaaccctatgaggttggcttttcttagcttctgtgaactgtagttagcatgttttgagttggtcaaatttatatttaattattgctttatcacttaatatgttactttgggcatcctacttaaaatatctgagtctcagttttttcttctgtaaatagaggttgttgtcaaaattaaataaattagtgtatcaaaagctcttaggacaatgcctggcataaaataagtatataataaattgtagggaggctgaggcaggagaattgcttgaacccgggaggcggaggttgcagtgagccaagattgcgccactgcactccagcctgggtgacagagcgagactccgtctccaaaaaaacaataataataaaaaaataagctgtagccatttttattaaactgaagttcaggaaggttaagtgacagcctcagcaactgaaccaagacctgaacccaattctgactacagagtttatattcctctcataataccaataatagtatactttacttaaatgccatattagattaacttccttgaataagaataaaaaaatcattttgcaaggtaaggtaaaaagtgatatactttaactaagaatacaaaatatctgcttttttaagagaaccaattcttacgatgtcagtaactttcaaagaataggatttatgaacctaatctttactcttctaatacttcaaaaattattgaaaggtgaaaatagcacttcgaacttcaggacaccttcttttgggagttgttcgaatctataacaggaaggcaaaatatcttttggcagattgcagtgaagcatttcttaaaatgaagatgacattttgcccaggtatacatgtaatattgatttgtctccttcttggttcccttttgcattttaattgggggtgggatcttttaatatacttcaggctagtatggtgaatgtaaacttagttttgaatgaatctaagtttccatggttgaggataaattgtattcatttccttgctctttttctatacctgcaggaaaaggttatgctttccaaaacttgtaatgttcctgcatatttatggaagacatatacttaaagccactacacttgcataagaaactctgatattctgtttttaatgggtcatttagtttgtcgtgcctgtttttgcctttataagagaaattagaaatagtgtgattgacaaaacagagatatcagtaattgttttcagaattctcaagattccaagcagcttgctatttatgacatatcaaaaattcctaagcattccaaagtgccagagatttacatatgtcataaatataataccttcaaaatttatataccatctgtttcactttgaagacattttttattttctaccttgtattatggctacttaggtatggatcttgcctctgtcactagtcttcaagcttcttgaaggcaaggtctttgtcataattattttctgaatctcttataatatctgtctcagtgccttgcacataccatttcctcaatcaacatttgttgaatcaggattgacagattttttttaatcttcttcatttaaaatattcatataatctctaggtggatttatattcatatcaagtatggttcatttgttcgtttattatttttttacatattccacaaatattcattgatttcatactttgtaccaaacactatgttaggctctgggatataaagacaaacaagataaataagatccttttcagtcaggtgaggaaatcagataattaaagtatttttaaaacattacagtaattgtaaattgtaattgtgctataaaggaaaataaagtgctacaacataaaataacagagaagttcactttagttaaaataattgggaaaagcctttctgagaagatagaatttaagctcagacttgaaaaatgagaactacccagccatgtaaaaagtccctgagggaatagcattctaggcggaggaaactgcaagagcaaaggtcttgaggtggaaaaatgcttgactttttcagggaacaaaaaggctagtatggtcagtatggtgaatgtcactagatgatgcctcttaggtttttagggttacagaggctccaattagaaattttgattttattaaatgcactggagaagtcactaaatcattttaaggcatctaatctgattagttttttaaaatattactctgtctgctttatagagaatggactacacaagggtaggagtagatagaggaaaactagttagaataagcagtagtccagtaaaagaatatagagttagttgggagttctttgttttatatagcattgttgcttattgagtatggtttttgatccttttcaggactggttgaccttccaaaagagaattttgaagcatcttacaatgctatcacattgccagaagaatttcatgattttgacacccaaaatatgaagtaaaatattttatttattttccttcgatttaattttcttgatatttgtttttatattcaaatttaattgagtcaaatggaatgtagttaacaactgcacaagtacagatgtaattgataaagacttatatttggtataaactcccaaagtacaacaacaaaagtgtgtcattttatttattgaatatagtttgcaatattgacagtatattcatctattcattcagtaaatattcactgagtgccttccatatgccggaaactgttctaggcactgaggagatagcagtgaattaaacatagctgctggcctcatggatcttaaattttatttggggtagctaataaataaacgaataaatatatgtcaggaaatgatcaccattgtgaagagaaacagaaaatgaaataaataaacagtaagacaggaaaggcttttctgaaaaggtaagaacaaatctgaaggaggtaaaggaacaaatcagtaatgtgggggaagaatattctaggaagagcaagtagaaaggccctaaagcaggacacactggacattttcaaggaccagcaaggaggcaagtgagactctagcggagtaaatgagaggctgagtggtaggagatgaggtcagagagatagcaggagacacagatgatgtagggtgtgatatactacagcgggacttttattttactcagggaacacaggaaggttttgaatagaggagtgacgggatctgacttgatttcaacatcatccctttggctacttactctaaggggaaagggaggaatcagaaagcacatgagaaagttattgtagtaagaagtccagataagagaatgcagtatctatgatcagttctcagtcatcatctcacccaggtggtagcagtcaagttacagatatatctggaaagcgaagccaggagaatttgctgatgaattgcatatagctttaagagaaaatgaaggatactatatgatttttggcatgagaacagacttaacacttcataagattagtataatcagatttaaagggggcagagagaaggaagtaaactaggttttgcatataagttttgggatgactgttacacatctgttatggtctaaatgcatgtgttcccctaaaattcatatgttgaaacctaaccttcaaggtgatggtattaagaggtggggctctgaagccagaatgaccttttaggaacaacaacaacaaaagagttggaagtgattaggtcataagagaggtgattaagtcataagagaagtgattaggtcataagggctccaccatcataagtgagattagttcccttataaaagagacctgtaggagttttcttgtcccttccactgtgtgaggtcacagcaaaaagacaccatctatgaggaacaggccctcaccagacaccaaatctgctggcaccttgatcttgtacttcacatcctccaggactgtgagcaataaatttctgttgtttatcagttacccaatctaagttattttattctagtggcccgaatggactaacacaatatcgaagggagtaggtaagtagttgactctccgggtctgaaattcaggagagaggtctgaagtggatgtataaatttgcaagttgtgagtgtatagatggaacttcaaccatggactctaagagatccccaaggtagtgagtatacatttaaaaaaagtaaagagagagagggatctgaggacttagtatttggtcattcccagtagttagtctgggatattaggaacagaaaaggagcaggtaggaagaaaatcgagaaatagtgatacctcagaggccaagagaagaatgtattccatgaggaagggagttgtttagtctgtttgggctgctgtaacaaaataccataaactgggtggcttattaacaatagaaatttagttatcatcattctggaggctgagaaattccagataaacttgccagcagattcatcgtctggtgatggcctgcttcctgattcatagatggcaaccttctcaccgtattctcacatggtagattgaggcagcttcctggggcctcttttataaaggcactaatctcattcatgggaatctgccctcatgacctaattatctcccaaagctcccacctcctaataccatcacattggagattagatttcaaaatatgcatttgaggtgaagaagacacaaacatttaggccatagcaaaagtcaacatctaagtcaagtgctgtttgtttgtgcaaataagataagggactgaaaattgaccactggatttggaagcctagagattatttatatacatgtatatataataaactagtgtttataaataatactattgagaaaatgaaagttgttttagtttcttcactatatcaatgatatttttacagtatcattgttttctgttctcatgtttttctcaaccttctatttctccatagtgctattgatgtttcagaacactttactcagaaccaaagcagaccagaagaaatcactcttagagaaaattttgacaatgatctaattttccaagctgagagctttggtgagaatatttgagaactcaaaattacaaattataatcaattatatttgtatttgtgtattgaaataatgccagtagacgtagctatagaatgaatcttttgatgtgtaaatgtaattcccaatacatttttccttgcctttttctagtatagatgtcaatgccaagactcagtcttaggatatacttctattctcagtgtataaccatttactgaatacctactctgtatcaggtgctatcaatagacagggcagtaccaaaatttaaagaagcagttcctgccctcaaggagattctgggtgtgagagagacacataaataaacagttaagatggtcaacatacatacaagattttatatgtatgctgcatgaaatgccttcaaaatatatttcttctggtatatgataatatcaattgtaaaataatgccttttaaatcagcctgggggtgaggaagaggaaatgctaccacactaaatgtatatattgattgtgaaacagaaactgatttttaaaatgttaaactcttgtttgggcaaggcgattgtactttatttttaaattttttttttgacacagggttttgttcttgtcacccaggttggaatgcatgatcatggcttactgaagccttgacctgggctcacaatcttcccgcctcagcctcctgagtagctgggactgcaagtgcatgccaccacactcagctaattttttaaaacttttttgtaaagacagggtcttgctatgttgcccaggctggtcttgaacctctaggctcaagcaatcctcctgcctcagactcccaaattgttgggtttacaggcatgagccactgtgcctggctagtgtactttaaaatggaagcaatatggtgtaatttaactatagagtatttgatctttttttctggcatctcctactccctgtcttatatcatgatatttatacacctcttgtcttggtctacaaactccatgaggatagaatctgtgtaatgttcatatttgagtttcctatagtgcccaaaacaatgagtataggagaaagatggcctatgtctatcttggtcggggaggggagtcaagaaagtaatgcttgagcgacatctctaacctcagcttctcatccttactctgcttccgtaactcttgccatatctgtagctgtgtttctcagcctgtggtgaaggaccagttttctaatatttgtccattttcaatctgtattgtattttactgtgtaaaatacaataaaatgaattattagaaaaattaaaaatttaaaaatcaaaatacaagtcttaagttttgttattagagtcaacatatataaaattgctctgtcaaatttctgtaaaactttctgaaaatgtgcttttatttctgtattttctttcttgtggaccagtaccagtccacagattatactttaagtagcactgatctcttactggctataaccccagacccagaattgcaacacattggcaaagaggtaatcatattccctactcccaagacactctttacaaattcccctactattcttatttgggcttgaaactttaggatcacttttttttttttttaaatggggtcttgttctgtcacccaggctgcagtgcagtggcacgatctcggctcactgcaacctctgcctctcaggctcaagcgattctcctgcctccgcctctggagtagctgggactacaggcatgcacctccgcactcggctaatttttgtatttttagtagagatggagtttcaccatgttggccaggctggttttgaactcctgacctcaggtgatccacccacctcagcctcccaaagtgctgggattgcaggcatgacctaccgtgcccggccaggatcacttttaactatactttctgtcagcttcatactagtgctgggttgtttgtttgtttgtttgttttttaattctgaaatgtctcttagatcttttttctatttccttagccagtgatatagttcaccagtaccaaagacctggagtactgcaataccctcctacaaatcttcctccagtctcttcccacattttatacatctttgtaagagcaattgtctttaaattccatttttgatatatcacattcctctgcttaagtgccttgggtccctataacttactgtatcacatacttctacctatactcaaggccctctgccaatttatcaccttctttattttatcagctttgttttactcttaatgtggactttttgctctagtcaagcaaatgtcttaccacccaacaaatacaatttagttgttcacatttctgtatcttcctttacaattttaaaaggtgggaagaacatgttcttagtaaatgggcagatttgggtttgaatctgaactttctctattgatttcctgtgtgacactgggcagattgcctaacctctttgagccttactgtccctatttgtaaagttgggatataactaacaacatcatagggttattccccttattccttcctttaatcttcttcaccaatatgtgatttttctcttctataaaaactgcttcaaacctaatgtcctctaagaaatatttaaaattaatccatcttattctggattgtaatataagatcaaaggcaatgattatttcttttatgtattttgtataatctgatattcttgtgatgttcaatgctgagaatatagtgtcttcataagtcttattctctgattgaccaacgctggcttttcctttgggagctatcaagctgtacctagatgatatgaatacattcttagtttttgaaaaagtaatttagtcttttcttctgagcaattctttaatccattgtcatgatagttgtttttttccactcttccattctagaagatttaggtctatagaagaattttcaatatgggtaatacttcatgattttctttactgtctaacactaacatgggttgttagagggaggagaagactaaccttggacctctggggtttcagactcctggacctagagattcaaacccaagagagggaaataactgatgtctggtcaagagctgacttctggtcccctggaactatcagtgtagtgttgtgattgtcaggatgcaggctctggagtcagagagagctgggttcagatcctgactcttgtcatttattatagtgtgactgtgtgcaagttacaaaacctttctgtggatgtgtttcctcatctgtacaatgagaattataatagtatcttctattacataatataatacatactataaacactcggttactgttagctgactgggtttgtctttttttttttttaacggacctctatcactgcctcctagcatattcgatatttattgaatgaatgttgtaagcccattctttaatattttacctacgtttccatttcctgagatgactaacatgttccttattttccaaacctccactatgcatgaacactacaagcaattgtccttgaaatactatgaaatatacttggtcaagcagaacttacttacctaaaatagaataaattattttccatagtacttttaccttaggaagttattaaactatatcacaactataaactctatgtaatatgttggcattttttccattgtatttgaaagggcattagactaaaaatcatgtctctactgattgagtgaccttagttgaataattcaagtaagtctttcagccattctcttcatctataaaatgaggtgttggatgacaagattatgctagatgatatctgaatttccttctaaccctataattctgtgtttctatgaattagtattaatgatatatatttatttaggggaggaatctgaaattctcagaagacatagcttctttgatgacaacatattactgaattccagtggtcctttaattgaacatagttctggaagcctcactggagaacgatctctattctatgacagtggagatgggtttggagatgaaggagctgcaggagaaatgattggtatgctatctggtcatgtggaaataaaatatttattttcatcaaattactacaatatattagtagatttattatatcaatctaaaatttcaaatatgtttttgtgttatgtaggtcaatacttttttttatacaagttttcaaagtctgtggcatgtttaaacatttaggctaggcctaagtaaatagccgtctgtttaaatatattttctatagaggttatgaactactgcttgtttttatttttacaaattcctaatttttggaggggagagagtgaggttagtatattccttataaaatatactaggctatgtactggaaaacattgttttctttaacatacattgtggggcagctaagttattttccagaattttatattattattttatatttatattcccctgcttaaggccttgggtccccatgacttactgtatcaaatacctctacctatcctcaaggccttctaccaatttattgccttctttattttatcagttttatttgttttactcttaacatagactatttcacattataaaatagtcatagaaatcgggtagagaaaaactaagaagtccaaatgcacatgttttatttattattattattattatttttgagacggagccttgctgtgtcgcccaggctggagtgcaatggcaccatcttggctcaatgcaacctctgccacctgggttcaagtgattcttctgcctcagcctcctgaatagctgggattacaggtgcccaccacaatgtccagctaattttttttctagttttagtagagatggggtttcaccatgttggtcaggctgatctcaaactcctgacctcaggtgatccacccgcctcagcttcccaatgtgctgggattataggagtgagccactgcgcccagccaaaatgcacgttttaaagattatttattggctgttcctatcaaatcttttttaaaattctctagttcacattaaagatctggttattcctttacaatgaaatgcataaagtaacattaataaatgtttagtgaacaaatgacagattccagtctgtatgaaaaaatattcattgtgtttttcaagacaatctattgcaagatgatcagaatatcctgttagaagacatgcatttgaacagagaaatttccctgccttctgagcctcccaatagtttagcaggtaggttgaaattttcctttatgagaaagtaatgggttactaatgtttaagcctcagaacttctgaatttaagtagcaatatagtatagtgaaagataaagaacaatgtctttcagactctgttagtctgactgtagacaatataaaataggaaattggattctgataaaggtacactgaagggtatttagccaggattgggcttagcatgagagaactctgccaatatattgtgctttttgaattattaaaatagtatatggtaaatggtaagaaaatttattaactagtatggtttgataatctacatacaatttgagagaaattacaaattgaggatattttccctatttgaaattcatacggaagtacctcagatgatttgaggtattttagtctgatttttcttaagaattaaaagtacaattagccccattttttatttgccacaatttttgatgttatatttgctttctaaaaacaacagtagaaactgaaaatacaaagagctaaaagtaataaaattttacttatggttttttatggatcaactgataagtgatttaacagaatagaatttttttttagcagacatatagtcaaattgttatcagtcatttactgtagttgctgccactgttttcacatctgctgtgactttagcccacccttagatgtctcatgtgcaaaaggggatgatgatacttgactcactcgaatactgtgggtcccacaccatataatctgtaagcctcttcagctctattaaataaatggttctaagaattcagatgttccagttagtaatataaatcttcagttagtttatctttatctttaattctcatacagtcctctagcctgcatcctaactggttttttttacaattacttttatgtggatgttgattagttgaaccagataactcagagtgtatatgtgtacctgaaaatgaaaaaatgaatgaaacaatattattatcaactgaagaggaaggatttacccttgatccaattgatatttcaggtcagaggcatttacggttttgttttaatttttaatacactgttaacttatttactttgagatgtttgaataatcactgaaatattataggagatagtcaatctagtaatagcacttgtaacacaatagaggagaagacggtgaagaaaattttagatgatccttttgaggtaggaagcgggactcaactccagaattgggggttggacaccggaccagatgaggactagttacaaggtgggtggggggagctttcaatcacacccacccaccagtgtgccatgtcaatttactgctgccatggcaacaccgggaattcacccttttccatggtgatgacccaatgattcctactccttccctgcataaaccagcccccttaatctgcatacaattaaaagtgggtataaatatgactgcaaaactgccctgagctgctagtctgggcctgctgagtagccctgctctgcagcagcagttacggtgctagagctgtaacaccaccagaggtgtaacactgcctattcaataaagctgttttcttctacctctgacttgcccttgaattcttttcctggacaaagccaagaacccagatgggctaagctccactctggggctcatttgtcctgtacctctgtatcacttgcattatattcagtcctgttcaaaccatgtatccagtttgggaaactgaaaaattttaaactaagttcaatttaggaaggtattgagccattactctgtagtgggcacgggaataaagaagacacacactttttacttttaagaagcttagaaaacaatctagtcaggaagataaatagtcatgcaagtgaatataatataaggcagaataaaaagatcagaggagaggcgaatgccttctagcatttaacttcaagcatcatatttttagggataagtagtaagtatgaatctaatatatctaatgtaactactagtctaatataactaatataactaggtcatttagaaacatcctagttgtaggtagtataattgatatgaatttcagtttataaactcaggcatgcaaacagtaaagcattttttttttaactgaattcaccactgagcctctatctcactaggctggcaggaaattcaatctgtgtagcttccctgtcttatttccaccatgtagttccaaagtttgggggaggggtatggaaggtggaagggaacctctggttatcagctataccaatctgtggttcccagggctccagcttacatagccttggggatcatcacatagccaacctctccagtatcttgtcttgttcctgggattttactgaggcacatcagccagcaagcaggttcctgtacattttggctccatttgatcttggatctttatcaatcctgagaaatctaaccctctctccccttttacagctttactaaagaaaagcttgacttctgctttctgcctggtaaaattccctggtggagtgaaatcctatggacctagttacctgcttggaatgtctatgaatttcagtgggagagggaaaaatacactggacaaatacaaatgagtgttgtagaaagttattctattacataagcattttaaggaacctccaaattggtggacttccctcttccccacctttcctcagttgctcacttaacaggtagatccctttctaagcacttccaagcaacaccttacaaaatgtatcagctattggttgctcagcataattttcagaggggagaagggattttctttccaatgcaacactgtaggttgtactgtggtagaaatttcttttctcttttggagatagggtcttgctctgttgcccagtctggagtgtagtgatgtggtctcagctcacttcaacctctgccactcaggctcaagggatccacccatctcagcctcctgagtagctgggtctacaggtgcgtgctaccatgtgtggctaatttttgtattttttgtagagacggggtttagccatgttgcccaggctggtcttgaactcctgggcccaagcaatccgcccacctcagcctcttgaagtgctaggattacaggcatgagccaccgtgcctggcttagaaatttcttaagtatttagtgcctacaatatgattttagaaagctgtataaccaatcacatttgtgctatttcttatatttagacattgctgagaaaaggaaaggcaaaaagaggagattgctcatagatcctatcaaggagctcagtagcaaagttatacataaacagcttacttcctttgcggacacactcatggttttggaacttgcacctcctacccaaagattgatgatgtggaagaagaggggaggagtgcatacacttctgtcaactgctgcccaggatttgattcatgctgaactgaaaatggtaacggttcctacccttctacatgtgagcaatgtctggttataaataaataataaataaataaataaacacatatttacatacatatataacagaatttaaacttgcgaagaagtacttcctcattttgaattaattttctgtattgtgtgtatgaattatagtttttcctttttagatatgtgcttgtgttttcttgaattgctttgctggtacaaaaacaaaaaaaacaaaaatgtgtatttttacagttgtttacaaaatgctttctgtcctctggctttaaacttggaagaaaaatgatacagaaggagtcagtaagggaagaagtgggaaaccaaaatatagtaggtgagacttcttaattctgttgatgttgaggggaatgctgtggaaacaaaaatttgatgttttaaatttcaaaatgaaggtgggatccaattccatattctcaagtataaatgctaactctggaagagtagtggaacttaaatgaaattattacctcggtattgcatttttctgcattttggattaatttttgtcccagagatttcgttaaaaagatgaaatatatatactatgtaaaccattcttattatcactctttctacctccttcactcccaaaggcatactcaaaaatcctcaaaaaagaaaatctttatatctagcaagataaagtttcaatgtaaaacaactaacatgaaaagtcatgtaaggataagaacagcacttaatacacttaacctgacgcagatatttctgtctacccaaaaggcacatggagtattaataatcactgattattatcatgataattataaagtgataataaaaccaattgatgtgatgagtgagcttccacttcctgatcacccttcctgaaggcattaaaacctgctgaacaatataccacaatgggcttgaactgtccatgttgtcttgtgagtgaatgtgtgagagcgtgtgtagaggagatggttggcagagaatggggagtggaggtgatagagacagaggacaagaaagggaagatacatatgtgagacttgggagcaataagaaagtttgtgtatcctttgcttaaattcttggatcccaacatgtctgtcagaagttttcttttgttacaaccatatcacaattcaagtttgaaagatattttggtgaaattgtctttatttccttgataattcagagacatccatgatgcaagagccaaattaccagcaagagttaagtaaaccccaaacttggaaggatgtgattggtggatctcagcatagctctcatgaggataccaataaaaatattaactctgaggtaagttatccagagagaatcgtaaaaatattttattttctacagatacagtaaaggaatgttgggactctggtatattttcttacatttgtgtagttcatatttcattttaaattgttttgcaatttgtttagtaagtagcagggtaaaacatgattttcttctgcagaatttttctaggagtttaggatgtaaattgcaagataaggtggtttcataccaagctagtattttgcatgatacgttaaatcaatgattgtctctatgtaaacctagttatatgctgagaatcctactaggcctcatattctttgtgtcatggaatgttttagaactgcagccagtatgcctaagttttgcttttcatcataaattcacccaagtatctctaagaataatatattttagacccaccaattccttggccttgaatctgaaagactatctaaagatctatgaccaaaacaaaattttaaaaactttttaagatataattttttatttgaaaaatattactatttgaaaacacaattggaaataatgtactttgaaatattttctcagttgttattttattggttgtacaaatataaatattatagccacaccagttaaaaataaaccagtgtttttatggtctgttccattatcactgtattttgataaccactcagggaattcaaagtcaacccatgttgaaactgaatgcccttggaaggaaagacaatttcacagtgcattcaaacagaatgtattttactaaatatttgataatatactggatattgagacactgggttgctagtactactctctccctcacttgggctcaggcatttgttaaagtgtacctaccgaaaattatgattaggcaaacctgtttagtttatgattttttggaaggaaaatacaactgcagttatcacagatataacaagatagattgtcccatgggcttgaagtagagagaagagagatcgatgtaccagttcttttgaacctttactcctttaccttatgcttatgctttaaaccttcaatactcctcttattctgcttccaaaaatggttaacaaatgtgaaatatagtcaagcatgggagcacaagaacaataagggacaagagaatattgattctgatgaatcattttcaaatcttcataaaacagaatttttatataccatacctgcaaaattgagagtatcaaaaatgtagaatactcatagaaattgaaagagaaaaacaaggcttcacaaatatgtatattaaataataaaatgtaactccttatgtttactaaaattttttaaagctgagtgaaaaagcaagtaaactatcttagaggaggcccttaatcaagattgaggaggacagctggggaatgaagcttggagacaggttgaagatgaaaagaggttgatagcttctatagcaatgagaagggaaggagatgatagggactaggaaatctctgtctctttttctttcttcctttatgtcttcactccccttccaacagacaggttcttcttcccttttgcccgtgacagctccagcagtggtggcaggaatcctgtcatggtcctcggtagggatattaatatccctttcctcactctcactccctctctgcttgcttattgcagatctctttcctctgccacctggtattggcatgagaatagaggtaggggagtggggctatataaaatgcttcaaagcaaagtggtctcagtagcacagcagtagagacttttaatgtgaggtctgcagtagagagggaaataggaaaaggataggaagcaaggagggaaggggcatgcaagttcttcctttatgggaggcatatggaaaattgtaacatttaagtcaaagactgcctatctggggtatttcagagataatattttgagaatgtgggtagtattttaaattagtttgagaagtgagcattcatgtgattaaagcatttaataaaattagattgttcctgtataaccactggcagatttacctaactttccctaatttgcttcagcaggatattgttgaaatggtgtctttagctgctgaggaatcatctttaatgaatgacttatttgcacaagaaattgaatatagtccagttgaattggtaaatatatgtgtagtcttggggatgttcttaaaaactttattcctaaatatttaacaccttatttatctaaaacttggcttttatagctgtcatgttactttctaaatttataatttaaatttgtgattacaacagagatgtttgtgaatagtttgataaaatattctgaattgctctgatttttttgtctttctttaatttcttttgaaacttcaaatacttttaagggaaagtgtgaggtttttgtgcttatcaaaagtagtgacaggattttaaatgttgagaatcactgttttaaattattgatataacatctctaaagaaacagaactatattaagagtatggcctagggcatttgaaattttatcttatttacaaaaaacttgtgggcaatttttcctttaacattatgtggcacaaggcttgtatctatacaaggcttctggaaatctgaaacaaaataatctggtagtcagagggccacatgtcaatagcaaagacagaagtaaagtctgatttccctgactccctgcttattaactgtcttatttctctggtattatcccagcatactgaaaacatttttaagattgtaaggaattttagtaaaagttttttagtaaataatataaaaacacctagtaagcctgatgttaatttgcttctataaaattatctatatattgagttccaagactctttgattgtttttcatacaaggaaaagagaccaaattctctagataatctaggacagaataaattacctgaactttttacctgaagtatccaaacagctgagccagaagtgggttagttcatttttgctattcgctgtgcttctgtagatgcaggttattttcatacatggtcaagcaaaccacaacatagcacaagttcagctgttttaataatccactgggctttttacacaatagattcagctgtagggtgtccagatagatcaagtggacaggctttagcagaatgcacagagtatttcttctgagcctttctctggttagtttagttgtgcattatagatgaagctagagtctcatggatctttaacaaagaggtttttacatttcaaaaactgcatttgtttatttaacaataaaataaacattaataagtgggtgtcctcatttatccaaggagagaccagaaaagaataatcataaattgtagctgaagggatttagaaaactctctagaataaagtgaccgtattttcaaatcagtctttttggaatataagaaagcatacagcataggcaggcctaggaagctggtatagttggtggaaatggggactcagtagctcccaggcttagtcaaagagtccctttagcctcacatgatttaaaatgtcatgcagaatattctggtgctttctgtaattgtcttggagtctatgaaattgaaagcacttttaggaagtgtctgggctcctatacatgaaggctagacagacagtggacatgaggtgagagtgacatagatgctgttgggctgcatagtcagaattagcttaggaaaaattatgaagtaggccaggtttgtgccacttcccttcccccaaccctttgtaagcctactcttttatcagattcatgaacacctttcatatgctcagtttctgttctcacatcataaggtgttagtttgtaagggattagaataccatttttaaatattgaggtatttctgaaagtggttaagccttaaataccaaaaaaaaaaaaaaaaaaaaaaagaatctatttagataacatgacagacatgtccaaggcacagatgccttggacaaggcatctcgaaatctgaaagatttctaacccaattgtacacaaactactagacagcagttatgtttagagcttccattaccagataagttcagataaaggcctttacaagacagaaatagctgtatgtttactcctgtcaactgagttcagattgaccagaactaggataaccctaggcaaaagttgttgtctttgctaattttgcttttcaaagtaaccgtaagaccctggacacattaacaaataaagatggcagaatctcctattttggagcctcttatcagaagagaccctggagagtacaggtgtaattgtgcaaaggtggtttatatttgtatgttagccttattctttttataaataataaagattataagctctttatttggcaggacccattgtaataattgtgtttcttgtagaagctaacactatgatgggcaaatagtcagcatttagtaaaatttgcttaaattaaatattttatctatcattcaaacaggagtcattgagcaatgaagaaaatattgagacagagagatggaatggaagaatacttcagatgttaaatcgtttacgggtgagatgctagggtttgtcaaccctgtttttattttaaaaaataagtaaatactgacttcaagcttccatatattaatgaaaacgcaataattttccttatttttttgaggccaaatcccactagagtgcaatgattttcagtagtatacccagggctaaatatagaagtttggatttggtgcctgcatattctaatcaacttcttacccacactaatacccttagatatccattctgtgtcccatcctcgtttttagcatgataccaactaattctcaatatgaaacttagtttatagcagttcaagagtgacaactcaggtaatttttgaatttaatttatatttttatcaaaataatacatgtatattattttaaaagctcaatagcaccatgcaataaggctgaaaagacagaaaggcctttgtcctacctctccttatccctaagtcctgctcaccagaagcaactacattaagctgtttcttttagtatttatatctatattcttaataaacatgcttttagtgctctttcttggtatttcagctttaaactatatctactgaattcttttgacagaaaacaaaagtttaacttagttaccttcccctccctagtatacttttagcatagtgttatgtgtttacagtgttatatttgtaatagttatgatgcaggtttgattgcgacagggagccaaaatattagtggcttaaaaaagacagaagtttatttatctgtcaggtaaaagttcaatctggtatggcagctatgctcacaaagttgtcagggacccaggtttcctttgtcttctcaagatccaaaatggctaactacccaccaggtctgtactccaatcagtaacaaaatttcctttaagagtacaacccagaaattgtatcactttttacacttcattgaccagtacttagtcacattgacgcatctagctgggaaatgtagtctttatttggtaagcttagtcccaactaataattctgttactatagaagaagagaatggaaattaaaggacaactagcagctgctgccataaagactaaataaaaattagttacattgaagcttcatagcataattacatttcttgtcaactttatggttgttttgtcattacctcattttttttcttttttttattattatactttaagttctagggtacatgtgcacaacgtgcaggtttgttacatatgtatacatgcgccatgttggtgtgctgcacccattaactcgtcatttacattaggtatatctcctaatgctatccctcccccctcccccgaccccatgacaggccccggtgtgtgttgttcgccttcttgtgtccaagtgttctcattgttcaattcccacctacgagtgagaacatgtggtgtttggttttttgtccttgccataggttgctgagaatgatggtttccagcttcatccgtgtccctacaaaggacatgaactcatccttttttatggctgcatagtattccatggtgtatatgtgccacattttctttctttttttttctttttttcttttttattatactatgagttttagggtacatgtgcacaacgtgcaggtttgttacatatgtatacatgtgccatgttggtgtgctgcacccattaactcatcatttagattaggtatagctcctaatgctatccctcccgctgtgtccaagtgttctcatttttcaattcccacctgtgagtgagaacatgcagtgtttggttttttgtccttgtgatagtttgctgagaatgatggtttccagcttcatccatgtccctacaaagacatgaactcatccttttttatggctgcatagtattccatggtgtatatatgccacattttcttaatccagtctatcattgatggacatttgggttggttccaagtctttgctattgtgaatagtgccacaataaacatatatgtgcatgtgtctttatagcagcatgatttataatcctttacttcatttttttatttgctcagtgtctataaacccattttaattatttttccaaactcagacaatatgaccaaactctgacaaaaataccatttttatggttttgtaatattttataatatctcttatcaaatgatccatcagttccattttttttccttaaaggtatctctctgggagctcaccatcctcttgttctgatccaaaccagcggctgtttaggtctgctccatagtttttgtcttgggatattgctttgtcataaacatgggaatttgtctctttcctgtatatattatttcctctgtggttttgggtgctttgatctttctttatcttaaattttttagtggttaacatcctttcataatttcctgagataaagagttcacgagagatacagaccctccataccagcgtgagcgtttcttttacctttaacgtgattgattgtctctagatgtaagttgaaaatatatttctctcagatgttgaaggctttgtaacattgccaagattcttgtgatgttattgaaaggtcagatattgccttagttggtgatcctttgtaagtaacctttattttctctctggaagcttttgatctattattgttattattattatcccgggcactctggaatttcatgatgtgctttggttttttttttttccacttattgtctttaccatgtagtgtgttcttttatacagaaatttcatgttcctgagttttagaaaatttttaaaaatttcttggactttctccttattattgttattttttaaagtttttcatagagtcaaggtcccactgtgttgctcaggctggtttcaaactcctggcctcagtttcctttttatttatgttttgtcttcctgaagggccagtgggtcagatgttggatctcctgaactactcctttaattttaataacatcttttatcctctatattaatttctttgtatttgtgtttttctaccctctagatttcttcaactttgtcttctagactttactgaatttttatatctgctttcacctttttgttttccaggagttttttttcttggttactaactattcttttattttatagcatcataatatttttatttaattattcaattaggtttctaaagcagctttgttgagatatgattaacatgcagtaaactatttatatttaaagtatgcattatataagtcttgacatatgtgtacaactgtaaaaccttcaccacaatcaaggagtaaacatatatcaaaccagaaaaactttccttgtgccccttttgaatccctcatttgcatacctccaactggcacccccattcccaagcaaccactgatctgcttcctctcactgttatcctagccatttttcatgggtacaatgaaaaacttcttaacttcagaggttgcacttctgctccctgcattatctttccttagtgattttcttgaatgtattcctttttgctctttaatattagagattttactcaaatgtcttgtagatcctaggattatctgcttttatttaagatagagacaccaaaaaactgactggaagttatatacgcatgagtaggggttgtagacttatggtctttatactgaggtaattgggtggcacctctcaccttccctagattgtattatataactgggttttgttctcccttagaatagtcatcttttccagaataatctttaagtctactgcctaggagatataagcatgatgccagtggctcaggaaccaaaaggaggtaaaggagaggctggttatctcactgttcagagtgtagaatttcccttaatcccactgtttgtggtatgacacttcaccatccacagcactagtgccctaagttcaaagcctcaatgcttgttatctccagaagggcaacttcacgccttctgctgtgtgagtagcggtctccgctactgttcctaagtagattctcaaggaattctcctgttttcagcttcatccctctccccagtttatgacacactgatgtctccaattcctgagcttttcctaggtactgtgtctcactcaaatcagcttgctttttgctggcttcccccctgccagcacttagggttcagttgtctctactctactaagtcagttatgtcttccactttctttgtctttatctccttcgtcactttttcttcctttaccttcatttcagaagggtttctgaagggaacacaaataaacgcttatgtttaatcttgcatatttgtccctttagggtttttcaaaataattcttgaaattgaaaaaactgtccttattctctcccaggggggaaaagccatccagttctcatcttttctctcaaggcagggaataaatgtaggctggatatgccatctttgaaaggttactgaacctgggccacgcctttggttaagataaagtatgacaaagtatttaatttattaatttgttgactgttatggacaagcaaaaccttgtatgtggtatttctaaataagcttcacaactatccagcgtgtatgattctcatagggacattggccagtattcactgcagtacttcttttctttttttctttttttgtgacagggtatcactgtcacccaggccagagtgcagtggcatgatctcggctcactgcaacctcatcctcctggtttcaagcgattcttctgcctcagcctcccgaatagctgggattagaggcgcgtgccaccatgcccagctaatttttgtatttttagtacagacaaggtttcaccatgtttgccagactggtctcgaactcttgactgcaagcgatctgccctcctcggcctcccaaagtgctgggattacaggcgtgagccaccacgcctggccgcactgcagtatttctaactaaaaaattacacttctactctaggactctgattccaaatcctagtcttcatgaaaagagttatcttcatccataattaaaatactttattgtacctcagttattttcagtaggtacacagatgtcatgtggtgaatccgacatctttttaatctgtgcaaagaaattgggagttgtttacatagtcataatcccctgacactgaaactggagttgtttatagtcaacaccaacactatagtacctttaagtagaagaagactgataggctgatcattttcattgtatttgaagcctcccaaagtcctgtggatttttttgtctctgcaaatatagactaattgccctttccactggagccatttatgttaacatcaattttaaaaaggcctatcatttgtataacacattataaatttatataacacttcggaattcttttgcatgcatgttcttcacgaaccaagcttgtgtacagtaacttgtgttgtttttatgtttactaaggagtcatttccctttttccatttaaggattttatagtcatttatccaaaatgtcaatattttgttgtttattacgcatttatagccggctttacttctaatgatcttgtttcccatttcttttttcttttctaattattttcccaggaatctaacaagatgggaatgcagtcctttagtctgatgaagctctgtagaaatagtgaccgaaaacaagcagctgccaaattttatagctttcttgtcctaaagaaacagctggctattgagctgagccagagtgctccctatgcagatattatagctacgatgggaccaatgttttataacatatgaaggaaacccagacatacagatttatggcatcactggaatttctgtgtagattgttcaatttaatgcagaagccatctggaagcagctgaaggtctgatccatttcatagataggctgacctacttcctctctgtagttcagaataatcatagctagaattggaaacctacatgcttacaaagaaatactttaaattctgttttgtttttttttgttgtttttttaaggacaaaggtctcactatattgcccaggctggacttgaactctgggttcaagtgattctcctgcctcagcctcctgaatagctgggactacaggcacatgccaccatacctggctcagaaatacttaattatagctaagtaattatttttaacttagctgatttgaatatatagcatttatcatttccctgatttgaatgttgcacttagcatacatttagcatgcatttttaaaatgctgtatgtttttgacagacattcaaagatgtttcttaaaaggctattttacattggagtatttacttgaattttatggggttaatgaaaacatcattatttctacacagactatttggttgcaacgtatatcatacttgatttgacataatgccatggtttttaatccaatattttaattgaagagttacaaagctcatctttgctttaaattgcctgagtgggttttagtctatttataggtcacttaacttttttatttactatttaatgattattataatcaccattaatgtgtcagcaaaactaaatctgcttcttatgtttaaaaaaattagcagacacttgttcctcatgttgtttgcagctacggtctgagtaaagatcaccaaaataaatgttcttttgtttggtgtttactgaacatttttgacattaaaactgttgttttccttttttcttaattgaagtttgagttaggacattttcatatgatgctctgtgagctccatcatacactgtcaaatgaagcctatggtactcattaaaatgttgttatatctggaattatgctgcaaacaacaaattctaaatagcctctctaaatgtgttaactataaattttaaatggcaaaattgcctttttaaaatttcttttattttttaaattaacatacagaaaatttgacttcttaattttggtgcacagttctgtgaattttaacatatttgtagagtcctgtaaccatctccacaattaggattccagcagtaacatcaccctaaaaaattctgttatccctttgtagtaacccccttcccccatataacatctggcaaccactcttctccatgactacacttttgtctttttgaaaatgtcacacagatggaatcatatagcatgtaagctttcgatacgggcttctttcactcataaatgtctttgagacttatcaagtgcttgcatgtgtcagtgctttgttcctgtttattgctgagtaatatcctgttgcctagatataccatagtttatccatttacccactgaaagatgttaagttgtttccagttttgacaattattaatagagcttcatacatttgtgtacatttttgtctggatataagtttttatttgtctagggtaaatatctagaaatgggattgctgggccatatagcaagtatatgtttaactttataagaaattacaaaattattttccagagtggatgtaccattttgcattcccagtaaccatgtaagagagttccagttgattttttgtttacttgttattttgagataattgtagattcacctgcagttgtgagaaataatacagagatcccatatatcagtttacctcagtggtaacatcttgcataactttaatataatacacaactaggaaattggcattgacactatccacccagcttattcagacatcacagttttacatgcacttattttgtgtatgtattaattctatgcaaatttatcgcatgtgtaggtctgtgtgggcaccaccatagtcaagaaacaaaacagttccatcacaaggatcacttgtgctaccctttgttagccacagccatctccctccttactgtcctccctggctcctgaaacccactaacctgttctccatctctataattttgtcattaatacagttaatttttatagattaatcttgtatcctatgaccttgctaaactcaaaaattagttccaggtgtttttattttacataaatggaattgaacaatgttttgcctttttttttttttacccaagctggagttgcagtggcacgatcttggctcactgcagcatcgacctcccaggttcaagcaattctcctgcctcagcctcctgagtaactgggattacaggggcatgccaccatgcccagctaatgtttttgtatttttagtagagatggggtttcaccatgttggccaggctagactcgaactcctgacctcaaatgatccacctgccttggcctcccaaagtgctgggattacaggtgtgagccaccactcctggcaatgttttgccttttgtatctggtcctttcacctagtataaaagtttcaggttttatccatgttttagaatgtatctttacatcattcctttttatggccaaataatattccattgtatggatataccatattttgtttatccactcatcagctgatggacatgttgattgtttccactttttaactactatgaataatgctgctatcaacattagtatataagtttttgtgtatataagttttgatttttcttggttatatacctaggcatggaattgccaggtcatgtgataactttatgtttaactttttgaggagctgtcaaactgttttccaaagtagctgcactattgtacatttctaccagcaatatatcagagttccaatttcttaatatccttgacaatacttgttattttcctttttaaaaattatagccatcctagtgagtatctcatggttttgatttgcattttcctaatgactaattatgttgaatatcctttcatggggatttcctaatagtttattaaggatttttgcatctgatattggtctgtatttttcttttactgtctttttctggttttgatatcagggttatactggcctcataaaataacttagaaagtgtttcttcatattctattcttctacaatagattgtgtatatttgtgttatttcttcttgaaatagttgatagaattcacccataaacaatgtggatctggatatttatattttgtaaagtttttttaaccatgaatttaattttttagttgtaggactattcagttacctatttcattttgaatgagtttgggtagtttcttattttaagtaattggtctatttcatctacttttgtgagtttatgtgtgtagaattgttcagagtattcccttattatccttttaatgtctgtggggtccatagtaataacccctctttcatttcagacattgttaatatgttttctcttttcagttgtgctagaggcttattaattttattgatcttttaaaagattttctcttttgtttttctgctttctgtttcatttcatttattcctgcttttacatttattattattgtcctttggcttgctttgggcttattttgctctttctagttttattaaggtggaggcttagataactgatttgagatcttccctcttttctaacataaacacataaagctctgtttccttctaggtaactgatttgagatctttcctcttttctaatataaacacgtaaagctctgtttccttctaggtaactggtttgagatcttccctcttttctaatataaacacataaagctctgtttccttctaggtaactgatttgagatcttccctcttttctaatataaacacataaagctctgtttccttctaggtaactgatttggggtcttccctcttttctaatataaacacataaagctctgtttccttctaggtaactgatttgagatcttccctcttttctaatataaacacataaagctctgtttccttctaggtaactgatttgagatcttccctcttttctaatacaaacacataaagctctgtttccttctaggtaactggtttgggatcttccctcttttctaatacaaacacataaagctctgtttccttctaggtaactgatttgggatcttccctcttttctaatacaaacacataaagctctgtttccttctaggtaactgatttgggatcttccctcttttctaatataaacacataaagctctgtttccttctaggtaactggtttgagatcttccctcttttctaatataaacacataaagctctgcttcttggtaactgatttggtatcttccctcttttctaatataaacacataaagctcttgtttccttcttggtaactggtttgagatcttccctcttttataatataaacacataaagctctgtttccttctaggtaactgatttgggatcatccctcttttctaatataaacacataaagctctgtttccttcttggtaactgatttgggatcttccctcttttctaatataaacacataaagctctgtttccttctaggtaactgatttgagatcttccctcttttctaatataaacacataaagctctgtttccttctaggtaactgatttgggatcttccctcttttctaatataaacacataaagctctgtttccttctaggtaactggtttgagatcttccctcttttctaatataaacacataaagctctgcttcttggtaactgatttggtatcttccctcttttctaatataaacacataaagctctgtttccttcttggtaactggtttgagatcttccctcttttataatataaacacataaagctctgtttccttctaggtaactgatttgggatcatccctcttttctaatataaacacataaagctctgtttccttcttggtaactgatttgggatcttccctcttttctaatataaacacataaagctctgtttccttctaggtaactgatttgagatcttccctcttttctaatataaacacataaagctctgtttccttctaggtaactgatttgagatcttccctcttttctaatataaacacataaagctctgtttccttctaggtaactgatttgagatcttccctcttttctaatataaacacataaagctctgtttccttctaggtaactggtttgagatcttccctcttttctaatataaacacataaagctctgtttccttctaggtaactggtttgagatcttccctcttttctaatataaacacataaagctctgtttccttctaggtaactggtttgagatcttccctcttttctaatataaacacataaagctctgtttccttctaggtaactggtttgagatcttccctcttttctaatataaacacataaagctctgtttccttctaggtaactgatttgggatcttccctcttttctagtataaacacataaagctctgtttccttctaggtaactgatttgagatcttcgctcttttctaatataaacacataaagctctgtttccttctaggtaactgatttgagatcttccctcttttctaatataaacacataaagctctgcttcttggtaactgatttggtatcttccctcttttctaatagaaacacataaagctctgtttccttctaggtaactggtttgagatcttccctcttttctaatataaacacataaagctctgtttccttctaggcaactgatttgagatcttccctcttttctaatataaacacataaagctctgtttccttctaggtaactgatttggggtctttcctcttttctaatataaacacataaagctctgtttccttctaggtaactggtttgagatcttccctcttttctaatataaacacataaagctctgtttccttcttggcactgctttagctgcatcacacagatacttatacgttgtatcttcacttttgttctgttaaaaatattttctaatttcccttgagacttgcaggtcttttacctgcaaattatttggaggtataggatgttcagtttcgaagggatatttccagtaattgattttgagtttaattccattatggtaagagaacatactttaaatgatttcaattatttcagattcattaagatttattttatgaccctatactaagttgaaaatttgtgtatacattttgactccccaaaaacttaactactaatagcctactgttgaccagaagtcttacctataacataaacagtcaattagcacatgtgttgtatatgtattatatactatattcttacaataaagcaagctagagaaaagaaaatgttattaagaaaatcataaggaagataaatatattttctattcattaagtggaagtggatcaacataaaggtcttcatcttcatggtcttcacactgagtaggctgaggaggagaaggaggaagaggagttagtgttgctgtctcggagatggcagagtcagaagaaaatccacatggaaatggacacacacagttcaaagctgtgttgttcaaggatcaattctgttctgcatttgttaggtggagtgttctataaatgtcagttggacctagttagttcatagtgttgtttagttcttctacatccttgtttattttgtctactagttctatcaattactgagaaaaagtgtttgtgtctccagctataattgtggatctgtttatttctcttttccattctgtcagtttttgctttatatattttgaagttcttttattaggttatatacatttataattattacatcttcttggtgaaatgacccttttattattttataataattctctttattcctggtaatattttttgctctgtagtctactttttctaatattaatatagttattccagctttcctttgataagtatttgtatggtatatctttttttatcttttacttttagcctacctatatcattcattatagttaaagtgaatttcttatagactgcatcaaataaagtcatttttttatccattcggataacctctgttttaattgaagtgtttagatcacttatatttaatgtaattattgacatttttggatttcagattttatttatttaggatttttggattttattttattttttttactgtttgttccctttattttttattcctctgttttcccctttcttgtcttcttttggaatatttggaattccatttttatttcttcttcttctttttttttttttttgacagagtctcactctgttgcccaggctggagtacagaggtgcagtcttagctcactgcaacctctccctcctggattcaagcaattcccatgcctcagcctcctgagtagctgagattacaggtatacaaccaccccactcagctaatttttgtatttttagtacagaccaagttttatatttttaatagagacctgttggacaggctcatcttgaactcctggcctcaagtgatccacccacctctacctcccaaagtgccaggattacaggcatgagccagtgcacccggcctatggtgtttttttttttttttttttactatattttttgtcatagattttaaaaatagctattctaggggttacaaaatacatacttaacttttcatgctctacttagaattgatattttaccacttcaagaggagtgtaaaaatcttacaccatataggtccctttatattgtaaaggaatatacatactcctcctttatattgtactagtcttatctacacacattgaacccccatcaacaattgttgctttccactgtcaaacatgttttaaaagatcaagagaagaatagcctattacatttactcaaatatttaccatttttgttctccttccttcttgatgttccaaatttctttctaatgtaatgtcccttttgtctgaagaacttaattcagtagttcttttagagcaagtgtgctggcaatggattatcttcattttccttaattggagaatgtgtttatttcactttcatttctgaaggatatttttgctgggtacaaaatcctggttgacaactcttttctttaagcaattaaaaaaaattgttctgttttcttctgccctccatggtttctgataagaaatcaacagttatttaaattattattcctgtattttttttttttttttgacacaggatcttgctctgtcacccaggctacagtgcagtggtacagtcagtcatagctcactgcaacctcgacctcccgggctccagcaatcctcccacctcagtctcccgagtagctgggactacaggcaaacgccactacacacagctgatttttgtattttttatagaggtggggtctcgccgtgttgcccaagctggtctcaaactcctgggctcaagcaatctgcctcttggcctcccaaagtgcagggattacaagtgtgagccactgcatccagcctattcctgtattattaatgcatcatttttctctgactgctttaaagatcttgttttgtttttaattttcagcagtaactgaaaactattattattatcattatcatcatttgatttattctctctggggttcaccagaatgctggagtttggagctttatttactctgttccactttgctgcctactttccacagttgaacttgcatctgggaccaggaggtaggaggacagtgacaaaaaaacaacaacaggggctcaccctccctcaggactacagctacttttattgaagaagtttctcctccctcagagttttaggcacctgtgggttcctgctgtcacagacaccactgcaggatggcctagggcctgggtcatgagacaatggagaaaagatttgaaaggaaaagaacaatgatatctcccacatactctgcgcatcagaagtcccttttcctgatcttcaagtcaaaactagggagattctttgggagctttctctttattgagccccaattccagattttgatctgccttgagaccaggacaggagttataggaagaaataaagatgataaattcaccactagttcagtggtagggtatatcaaattctggcttcttccccagtgtgcctgctagtattttgtcttcagaatcctcaaatagctgctacatgcattttgttcaggttttattgctgcattctgtgggagagtatgcttagccagaattggaatacaattgtttttgaaactaaaaaaatttttaatgtattttcaactagtccaaaacaaaacaaaattactaatttattaggaataattttgttttatacttataatcctcatttgttgcaatttacattataactaaacaccagttctcttctcaatcatctgcttcctgatgataaagagaatactttactagctaacaccattccagatgggagtaatgtgagtgaagtcactgtcttgctttggggaagttccttgtggagatttctgggaaatgtagtcttctaagtaccaagcaaaaaaaaaaaaaaacccaaaaaaacccccacacaaaaccccacacacatacacacatgaggatgggacagccaggcatggtggctcaagcctgtaatcccagcactttgggaggctgaggattgcttaagcccaggagttggagaccagcctgggcgacatagtaaagccccatctctattaataaacaaaacagcatgggaacagacaaaaaaatattttaatgacaatctcagaaatgttctccttctaaacatgtaataattacatggcttcctttggtttcacttttaagtgtaaaaatgtcacttatataatttcagtgagcattagagcagataaaacattttatcaattaacttgctaatatagcattaggtgttttggacagaagacctcaacatttcacatggctttttcaactagtttcctattcctgctaaattgctctgccatgtttttctagaaaacataatataataatggctatctgataggatatggtttaacggaatacaggagaaaatagaatcaatgtcctctccaaaatttattagcatttgttgcaaaaaaagtaatggatttattgcagctcagagatacaggaaaagatttgactgtgaaaagcaacagtaaacttaaaataattattttttcatgtacattatcaatattaactgtttctcaccaggccagtactgcagagtcatgatgtaaatcagtgaagtcactttacaaattcttctcttggaaaagtcagcttggggcagagagtagagggtaccaagttcagcaccggcgagagtaaacagacttaaggacttaagagccttaagagacttaagacaaaaggacttccaggatggcatctggcctagtgttcccatagaagactggggcctggcacaatgtgtgcttgctttctcattcacttagtcaatatttattgagctcctactatgtgttaggcactgctctgggcactggaaatacagcaagggaaaaaaacaaagttccttccctcatgaagtgtacattctagtgggagtgataaatgacacatagtaaatatacactatgtcagctggtaattaagtgtagcaaaactaggggcaaaggaggtggagaggagggagttagtattttatgtagaatggttaaggaagccctctctgagacagtaacatttgagcagagacctggaggaaaggaaggattgaaccatgtggctctctggtgtgttctaggcaaaggggacagcaaatgcaaaggcccagcagtgaggcctcagcaagaaggacagcttgatgggagaaaagtgagtgatggggagagccacgcaagatgaagtcagagagctggagtaagatgagggcatgtggcggagagcgatacagaaaaccactggatggtttagagcagagtaatgacagatcagacaggcctggttcagaaagaaggagcccattcccactccacctacttcccacacatgaagcagataagaaaccaagcccagaaagtgagttaacttatctaaagttgtatggctagaaatggaagggctaggcagaaaatccagttttttggactttttggtcttcttgttttccctgtgacagatggaagacagagggaaaagagccacaattaacattttaagttgtgattgtttatctctccgagatctttccaatgattcacctttttactacttaagaggaaaacatttccattttcagacacttaagattcctgctatcattgttagtagcccaagtgcttgtcattcacattaaatacccctggtactcagacttggtttgggcaatgaaaaatgttcctaaaggcttttagataaaaattactatttcactagagccaactatgtgccagggagtgagactggtatcatcaccccatgttagagaagaaaaagctgaggcccagagaggtgaagggacttgcacagggtcacacagccgaccaagacgctttccaccacgcccaatcgatcgcccagctcaaaataccggctggtgtgtaggtgggagaggccgccgctccccgtgtgctcgttgtctctgttcccaggccctctagagcaagatactaactatctctttaagaaggaaagtaaagacgggccgcttacgcagctgccggcgagccgccgactggctggtcccctccatccacctcaccctccccgcccctccctcccggcagccccagccccggcgagcacccagctagccgcctcctgcaggggctcgggagagcaattcggcggcccctgcagggcagctgaagccatggaagcctccgcaggtgatgacaaggaccccggggatctccgggcccaccgcccagctgcacccgccgcagtccagagtgccgagtgccagggggtggggtgggggccgcgggccgcgaggaggaggggacggagcacccggcaggcagcctgccctccaagccttctggctgcagcggcccagctgtcagcggccgggggctcagctgcctgggtgttccccgcccgcgctcacccgccccggtctatctctttttcctaaccccgcaggtcgctgatcagggccaggcggctgcagcagcgactgcagaggcgctgcgccaagccgggccggagtggtgcgagccggcggggctgcggagggccagtggactcaggtgaggaggccgcggcggagcggggagctggccctgcgctgcaccgcggcaggtgggggccgcttgcaaccgctcgctgcggtagaatcccttggagggcaccagcctaagaggggttaatcgtgactcattcttaccctcccttcattcccctacatccctttaagcgcttccctccctccccctccctgaaatgtaagaattagagggtgctgattgcagcagagaagatgcccaaagtgggtgattaggaggcttttagggaacccaccccccaattttatttgtcttccccttctggcatttggcaaacatttaagcttctcttttccttcttggaggaggagcaggggtacctgggggtgggagaaggatgagaccccacccccaccccaaggtcaagtgccaatgactgcttccatcccatctttccctctgagaagcatcagggccctgcagtagatctggggaaaaaatgcccataagtcctagagtggacgatctgagcctccgtctccccggagcttccctgggatgtgaagccttccactccccagccgggatctgggctgtttgcaacacctactagcctggggagccccatattcccttccccaaccctgcagactgaaagagaggccggtcacatgctgcccgtttcctctgccttctctgcccatctggtggtgtcgggatgggctggaggagcttcttagaaaaaggtgatctctgcaggcagagtcgtgtaaggaaagtgccagagattggggttctaggcccttaacttgctagttggccacaagtagccattttaaaattctctaggcgtgggtgtctgtctgctcatctgttagatgcaggaattggattaaatgatgtgtataattttagtatatcactcaagcagcttttacatgtcagggggacccctctgctaaggcaatttaaatttagtttcatgaaataattggggtttcctcagttgatctctttcaactctgacttcttaagtgaaacattgaccttgtgggcctcaaggagctggaggtgccagacagtcctatgttgacatccctgagctgccaagtgacttcccttcccccagcctcagtttctccatctgtaaatctaggggtacagcccgcagagggctgatgtgaaaattaaatgagatgtatgtggaagcacctaaaatagtgcctgtgcctggcacatagtaggttctcaggaactcaggacttgggagataggctgggggaagagaggaagaggtgactgcttttagtcctgttctcctccccatcccctgcctgtctcttccacacccctgcagatggtgtccctgccaggggtaatgaatgctgaagtgtattgggtcaccaggctgagggcctaggcaggcagcaacatttccactgcaaaggttgtgacatcattctagcaaatgatggtcccaaggaggactgtagcccagcattgggtttggaaaatcctggcatccaagggcggagtctctgagggaacagaagcagcagattcttgtgtgctggcagcagggcagggatcaggtcttccggatctcacatgaatcccactgtggctctcttgccctccctggagtgtctccctagagtcaccctgaggccaggcagtcaagtttttggtgcttgtattttcgattctttatcttccttcctgctgtcattttcagcctagcactcaagcctttctcgctcctctttattccagatacctcctgccttttgacagcatgataaaggaggttctccatagggttgggtggggaattttgctgctgcaccatttgggccaaaagaagttgtcatgtccccccacccccaccctaaattcctatttggcagaggccctatcattttcctttctctatctccagcctctggcccatgagtaggcccaaagtaggtgctccgtaagtgttgaatgaaacaaacttgaggaaattatgtccctaagccaactaggttagggagaaactgtaggaatgtgttgattatgtaggtgaaagccctttttagtgtaggacatcgtccaggttgttggttgtcattattattgctattacagctactgttattattgctattgttggtgattaacagatgcttcgcctactcctctagggctcctgactagaccaaaaggggccagatgtgcctgggagggtggtgatgttggcaaaaagggatccagatggtgccagctggtgtgagatgactgtgaagggaggaggattgggaagggaatgattctagccattttctgtgtttgagggaggagagcaggtaattagaatcaagtgggacaacatggatatgcagtagaaagtcaggagacccaggtcccatgtcccattgaaccactgccttattatgtgaccttgggccagtcaggcctcccctcaaggcctctgtgtgcccatctatataatgatgggactggactaagtgatttctaagaccccttctgcttctgacattctgtcgagtggattttgttaaataaaaatcagacaactatgattaccctcaacgtcatttatgaagtcccagaccattaactgtctcaggtaatccttaaagaaaattatgaccatttcaaagatggggagactgaggcttggagagactaagtgacttgctgagggttgcgcggctagaactgctatccgacaccaggtctgtctgcatcgtccccttccaaaggtttcgctgcctcttcatgcataccttgctgatgctgtgagctgtgtgtgcacttgcaggtgggaacaggggtttggagaagaagaagctgtgaacaatttacggtgagagatcaggcatttctcccaggtgattggtgcagggtacttcctggttgaaaactgtgtgaaccaggaatggagagttttcctttcaccgtgagccctgctttgctgatgtttggtggatgcccctttaccgaggataatggttaggcctgaatgacagtcaggacagacacacttttttagtcttcttatgtgttgtgctctgttttacacaggttcaataatttactgctcagatcatcccattatgtaggcactatatataaatttacccatttttataagtgagaaagccagggcagagaggcgaagggtcttacccagagtcgtacaaccagtgtatcatagaacctagaaaatgtttagctggaagtgcactggactgggtgtccaaagggttgcttttagtctgagccctctcaataactgaataaccttgggtcagccagtttccctccaagagttcccatccctcaaatgatctgcatgcatctactggctccgaaaggcctacatgcacccttgttccagtattggaggtggaggggattccttaacttgctaaacattgaccagcatttgtccttatttattagctaggccctgggctaagtgcatagcatgcaggaaagagtaaattgtgagtcctagtttcaagaagctcatatctaacagagggagacagacacctaaacgtgtagatatgagaaaacatctggaagctataagacatactgatatgtgtgtgatggggtggggggacagagagaggggaatgatctttcctactgagtgggtcaggaaggctttagagagatgatgccattgtcatctctatttttggcattgagcttgtgaataataatttaataataatagtaaagggttctactcgatttagaatgtttccaaacagccctaaagacttgttggctcctgtcctcatcaatctagaaggtggacatggagtctaggggactatccaagctcacgctgtaacacaattttgatggaactatctgtttgtcccaggtagaccagaacctttcctgtccttaaagccttctagaagcaggattttgaaattcctctgacaaagactgtcttgtgcctataatcatctgataggcttggggaattcttcttcatgtctattctaggcatcccacctgtctggaggaacgcctaacacctgagaggtgaagtcatttgcctaagattactcagcagggcttggttcataactctggcctaacggggattgcatttctaagccacatggggtctttctacatctaggccaccagaagccccaggtgccagttctccatttgatgggcagctggtgctgtgggaagtctcgatgcaggtgatgtgaagctcaagccaagggccatggagaggctgaggcctgtgcaccccaggctgctttgcattaatggacagatatttatgacgtgtttgtcgcatactcagcactgtcctctgaattgaggggctgagccaaccaaaagggagtggctggaaagcagcctggcacagcaggaagagccagcaccgaggagtcagtagacttgggtcctcaccccagctctgccgttgacccactgggtggccttaggtcagaccctttgcttttccacacctgcaaaatgggagtcagaggtgatgatatctaagagcccttctagctctgagtggctaacaattcagaaactctttcttcttcttcttctttttgttttttggaggcagagtcttactctgtcacctaggctggagttcagtggcatgatcttggctcactgcaacctctgcctcccgggttcaaatgattctccttcctcagcctcctgagtagctgggactataggcatgcgccaccatgcccagaaaatttttgtatttttagtagagagggggtttcaccatgttagccaggctggtctcgaactcctgacctcaggcaatccatctgccttggcctcccaaagtgtctttcttctgttctgtaatgactttagggggtaaaagggtggataggatacatataattgttacttgaggaagaataagataaatataacaaaaggcatgaacaaatgctttgtggatttgctggagggagaggggttgggaaagactcagttcaaaagccacctcttcaaaaatagaatgatgcagacatggttagatgaagttatgagtttttgtttttttgttttaaccaagaggagtaacagaagattgctgtcatactgggacaggaagtctgtagcagagcagtgggtcttggacttagatttcacaaagaccagtgcatttgggaatccatcctcggttagctagctttttattttaccagacgaggacattcagatgacacttagggtcctctttaccatcactatcataaaataagagaaagaacattttaatatttctattcccccaagtaagaaggccatgttatcagggggaaaatggtattccttcaaattgaatacattttgctttgttaaaaactcactgcattgtctgtattttcctcatttttgccacagactcgtgttctcgtgtttggctctgcaattgggctgctggggtttgaattttggcccagttatttttttccctcagagcttctgtttcctcacctgtaaaactgggaaatgatgttgtctcctaaggtcattaggaagactttacaccaaaatgaaatatgttaagcaagggatgtcaaatgtagttgtctacaaaggtaaaacaggccagttgggctgtttggggattgtagcacattggaaagtgcttgcttgaaagaggcagctgctatcctgctctcaccattcttgcctacaagaacatgtgcccaatgttgtcagatcttctgatttataagacagaaatctgcatatttgtttgtgacatctcctaatttttaaaatgtagctgattaggcaatatttttaaatgcacatattaaaatgtgtatgtgaccggccatccgtctgtgacctcagatgtaaagttttagatgctgggcacatagtgctcagtcattattggctggcccacagatgaaggcagagaaaggaaggaaggctggaaaggcagcctaggccagggaatgccttgtttgcatggctagggcatttagcctgactttggcagcttgtgatcttctgcttctggctcccccagcttcaaaggccctgatggtgccccttcccttttggcagcactgtcaggattgagtctctggggactgaggcctccagatacctctgtaccccttgaagctggccctagccacgcctccctaccacagggtctctggaagcttggtcggcagcttcagaagagggaacttggctggtggcctgtgcagcctggcacagaagccacctttgagaaagaggggtgcagagagactcctggcaggtcctcagtgggtggggtagttcctgttctttggaagccacgccggccttgcagcagagcttctgccaccctctccttgggttgtgctgtggtctggacagcaagcagtctctctgtggacagctctgacacatggtccctgcagaggaaaagttgggatctggttgcaaagagagcctagagtgttcttagagaaggacctcagaggagctcttaattagcagaagaaaccctaccacggtttcagggccttctaggattcagattaaagccactgatgacagttcacattttttgtggctccagttaatcaaatattcatcaagcacctatcatggtaaggttctattctggccacggtgaaggaattcaaagaagtatttacaaccattcattcaaccaacatatactgaggatctgctgtacacacaggcaccaagatgtggtccctaccctcagggagctgtttaggttggttggagggaaggaatgtgggtggtgcacagggcctgacacatagaaatattaacaacagctgccatttgactgtgtgtcttctgagtatgaggtgctagccctcatagcacctgttttagagggtggatgggaactgaactgaatcttcatctgaagcactcagcactgtgcctgccacacagtgatatagctgcattattcgtagcctggaaaattgggcagatgcagaagaaaggcaacgtaaagatgggacggagaaaaaaagaagcagtcaaccaatccgggcccacttagcatatgttatccttgttttatagagaaagacactgagactcagagaggggaggaaatttgttcaaggttacacagcggctgtgtagcagagcctacacttagatgccagtctctttggcatcagagctgcgttcttccctctaagccatactgcctctaaagaagtgatcggtgaacaaaaaataaataactaccatttgttgaacacacacaacaggtgaggcactgtgctgcttgctaagataggaagttttttaatagttgaggaaactaggaccactagaaagaagaaactggcccaaagttatataagcacaagtggtggggtggggactctgacacaggtatacaggatgtagcttcccgcaccgtagtgacaggatagcagttttcaggggtaaaggtattcaaagtgcaggcatgggagagagtgtgggcttctgcatgccctgagagatagataccagaccagtccttgcaagtgccagcaaggaaggcaaattttggctcagttcaagggatgaaagggagaaaattctaaaaaaaaaaaaatctagtaacaaaacaatgtgttttgagagctggcacctcatctctgggctgctcacatagggctggatgttctaggaggaattcttgccataggatggagtttggaaaggctgtgcttgacagctgtaacccagaagatctggaatcctagtatagggctggtcacagatgaggcaagcagtgggtgctgctggcattcccaggagaaagaatagctgtaggttgagactatctgagaaggcttcccggaggaagaggaggaactagaaaggatctaaaggctggcactcgggaagggagcggaagaggactgtgtaaggactgtgagtctgaggacactgagctctctagtctggctaggccatcggtctggtgcccttcagcaaagggcagctccctgtcctttctggcttttaaaatggtggaagcagaggtacagtaaatcctgggtcctgcgtctttcccaaagcctcattaggcagccagtttggcaccacctcccccgtcttgcttcccacacatcccctctgtatgcattgtaagattcgcctcccttccagcctccctttcagaagtggcggactttggacgtgcagccccagagggagaaggggtgcgctaaacatcacctcttctgtgaggcaagtgtcatgaggcaaactacgtcttctggcagtggccacctgcctcacttttggggctcagagccaaagggggaggagccacagctccatccatttaagccaccctgggccttctgggagccactcgcttcctcagagccaggcctggctcatttccagttctgccacttgttagcctgggacttcagacaaattgtgttaccccctgggccattttctcatctgccaaagagaaatcgattattcctgcctgagaggagacgggatgatctgttgtggtcccctgtgggaaagagcctggtatatagcagatgtccccacgaacactgcttcctcctgtctctatgggcctcgattgcttttctgaccctctaagtcccgactcttgtccaggttaatgaaaacagctacactacatgtcgggcacaggggatatgtgaccttatagcatcttcctgacagcccaggtaaggaaagcattattatagaaaaggaagctgagttataggaaatttaagcaatttgtccatggcccacagctgttacatggtggctgagctaccaaatacctgattccagggcccaaactctccctgcccctcattttgctttctcattctcttcctctccccatttctgttctcttaggcctgtgaatgggcattccttcctcctcaaagcttagctgggctcttacaccaaggttgctagccctggacctgataggagtgaggtggtctaagagctagagaaggacattttgatagtttatgacttcagaaaagtccctgagtgacccttggacgtgttctaccccaagtcagcagtatttcctccctgccattcctttctacctcaattacttttacttgccctgtttcctctgcctgaaattttcttcctactactactgctatctcctcatgttcagatctgtctcaaggcccagctcaaacactgtctttcaggggacccacttccaactcccacagctccttcacagagcccaggctcttagtcaccagcctaagctctgtgctctcagaggatggagaggacctgacccctccacaccctcctgttccctgactgcagagaccagccctccctgggtggcacgcagggcccagattggagctgtagaccatttgagccaactgtctgtggcttccttctggagagccccttccccctccacaggaggggggctcctcactctggggccgtgtgtttgagagagaagccctcagaggttgttaggcctggtagaggtcagttttgtaaggaatccctgaggccagccatccagatgaaaaagcccaggatccaagcctaggcagcactggcccccttgccctgctctctgagtggttgggaacagagagcgcaggttggagttggatacacttggactgctgtctccgtctctgccgtggactgactttgtgactgggcaagtcacttaatttatctgacccttagtacctcaatagtaaaaatgggcatcataatcataacgtaggcctcctgacagcaaagctggcatgagaattaaactagattagaaatcttctatgtgtaaagcccctacctagcccaggggctttatttattaaacacagtaggtgcttaataaatgccagtaccctttcatccgtgttgtataggaatcactttataacttccctactttcccaaagtgccaacacatcttcatttggcagtgagctccctcctcactggaggtattcaaactgggtccgggtgactgcagaacaggaatgttattccgagaaacagaacttcagtcagatggatgttgggctttgaaaccttcagattctttcctgtccagaatttttgcgattctgtgaagacttgactcagatctcgttggtcaattattagaaatcagttggggttcggcttggatgtctgttttgcacagataaaagacagacttctgctggagttgtgaactaattgaaggctttctcccaagaggtggcaagggtagaaacaaaatcaggcccaggaggaaggactccaagggatcctggaaagggaatctggctgggatattaggggcatgtggcgaaatgtttaggttgaatttggggaaggctataccacggctgctagaaataatttcctggggcaaggattgtttgatttgtctctgaacccccgtacccagcacaaaccaggtacacagaaacattctagaaaaatgttgagtaaatgacaagaagctttggtgtccctatcagatggaatcctgggttgagggactccttgggactagaggccatgtgggagtttcatactctgtgtgtgtatgtgtatgtgcctgtgtctgtgtgtgtctgtgtctatgtgtgtgtatgtctgtgtctgtgtgtctgtgtatgtgtgcctgtgtgtgtgtccatgtgtatgcctgtgtgtgtgtctgtctgtgcctgtgtatctgtatgtgtgtccgtgtgtgtgcctgtgtgtctgtctgtgcatgtgtgtctgtgtgtgtatctgtgtgtgtgtcgtgtgtctgtgtgtgtgtgtcagtgtctgtctctgtgtgtgtctgtgtatgtgtgcctgtgtgtgtgtgtctgtgcctgtgtgtctgtgtatctgtgtgtgtccgtgtgtgtccatgtgtgtgcctgtgtgtctgtctgtgcctgtgtgtctgtgtgtgtatctgtgtgtgtcgtgtgtctgtgtgtgtgtgtgtcagtgtctgtctctgtgtgtgcctgtgtatgtgtgcctgtgtgtgtctgtgcctgtgtgtctgtgtatctgtgtgtgtcagtgtgtgtgtccgtgtgtgtgcctgtgtgtctgtctgtgccgatgtgtctgtgtatgtatctgtgtgtgtgtgtgcctgtgtgtgtctgcgtgtgtgcctgtgtgtgtctgtgcctgtatgtctgtgtgtatctgtgtgtgtggcgtgtctgtgtgtctgtgtgtgtgtcagtgtctatgtatgtgtgtctgtgtatgtgtgcctgtgtgtgtgtgtctgtgtgtgtatctgtgtgtgtctctgtgtgtgcctatgtgtgtgtctgtttgtgtgtgtatctgtgtgtgtctctgtgtgtgcctatgtgtgtgtgtctgtgccggtgtgtctgtgtgtgtgtatctgtgtctctgtgtcagtgtctgtgtgtgtgtttgtgtgtcagtgtctgtgtgtgtgtatctgtgtatgtgtgtcagtgtctgtgtgtatgtgtgttgtttgtgttgtttgcctggcttcctaagacaactcctgtttgctatgctttctgttttctttcctccactctttcccatcctcctccttctagctttattgaaatatagttgatatacaagcttcacatatctaaagtacagtgtggtaaattctgacatatttctatactgatgaaaccatcaccacaattaggatagtgaacatctccatcgtccccaaaagtttcctcccccttcatcctcaggcaattactgatctgctttctgtcagtacagattacttcacattttctagtagtttatataaatggaataatataatatgcacatttttggtttggctttttcactcagcataattattttgagattgatgttgtgtataccaatagtttattccttttttttcttttttgttgagacagagtctcactctgtcacccaggctggagtgcagtggtgcgatcttggctcactgcaacctccgcctcccgggttcaagcaattctcctgcctcagcctcctgcgtagctgagattacaggcatgcgccaccatgcccagctaattttttctagttttagtagagacagggtttcaccatcctggtcaggctggtctcgaactcatattccatagtatggagaaaggataaatcatcatttgtttatacattcatctgtttgttgatggacatctagttttttccagttttttggctattacaagtaaagctgttataaatgtatgtgtataaatctttcaatggacatacactttcctattttcttgggtaagttcctagaagaagaatggttgtatcatttggtaaatatatatgtaactttttactgcccaagtgtttccaaagcatctgtaccatttgacatttctactcgcggcattatgggagtttcagttcctctacatcctcatcagtacatggtatggttagtcttttaaatcttagccactctaataggttcgtaatggtatctccttatggctttaattggcattttcctaataactaatgatgtcgagcatctttttgtgtctatttgacagccacatatcctctttggtgaggtatcagttcaagtattttgcccattaatttttaaaaactgggctgttggccttcttattgagttgtatgagagtactttatacattctggatataagttctttgttaaatatatattttgcaaatacattctcccagtgtgtagggcttgccccagagggcctcgtggaagtttcttgctcagtgtgtatgagtgagtgagagagacactgatagaaagactggtttcctgagagactccggcttctttttttttttttttttttgagacagggtctgactctgtcagtctgtcaccaagcctggagtgcagtggcaccatcacagctcactgcaacctccacctcctgggctcaggtcttattttgcaaacagggagcctaagtcccttagatgccatgaaggtttagtgtcagagcccacaaacagctctgatgtccagagaggcctggctggcccttgatgccttttattcctgtgaccctgggtgagtaaggtaacttagcatccttcatcttgtgaagatgggcacagctgtgccttcctgtgggtgagagactggagtagagctctccagccgaccctcccaacagcaagggcgaggagcgtgtgtcagtgccaatgccatcaaaaggccttttggaggcagagatggagaggcgaactattcagtaaggaaggtttgttgagctccacactgaccagattggggcatggactggccggagcggtgcccacagcttttctgcgttgctctgagctgtgtggagcctggacgaggacctcgtgacttcttctgccagacctctttctcagctcatcagcatcacacacacatgtgtgtgtgtgcatgcacatatacatgtaggctcagtaactcccaaagggtgggagactggtctacaggtggggatgtgtgtaaacagcctgtatcttactggtgcacgatgtgctctagctgtgaattctgtctcccttgaggctacacacaagcattcaggcctggattgaacttggaaaataagtaggctgaagaggcttgggagagctttccaggaagacagcactgcataggcagaagtccagtgaattttcaagatgaattgcaaaggaggtgtgtgggaaatgaggctgacaaggcagaggtcgggttgtcacaactgctgtatgaggtgggatgtgttatctccactttatacatgggcagactgagggacccagaggtcaagagaggtatgccttaggtctgagtcatactgagtggcagagctgagtgtcctggccccaagtaccgtggtctccatactgtaccaggctttgtcccaagagagtgagaggatggagctccctcaggggccctcttcctggttcctggattgatggaatggggttctcagaactgtcaggtcatctgtttggctgcctgacttccctcagcaggtgtttactaagcctcgatttcgaatccagctctgttcctagcacctgggaagactccaagcctctgaaggcatgatgcccattcctcttttagcccttgcaggatagcagacacctagccaggttcccaagcccagggtgctgctgttcacaactcacaggccagaactgtctctgcaactctgggtggagtggggggtgtgtttgtatgttttaaggtgggtatattgccacccctgaataaggttctattattgagggaggagggatagaatattgagtaggcagcgaagctaacccacacagaggcctgggcgtcatcacaattcttccctttccgtcattccctacagcctatctcttctggggaccctcaagagtctacttcctaaatttctcttgaagccacctttacttctgtcacctcctcacctccactctcattttaacctctatagccttcgttaaaacgtcgtcatccctgacctgtcctggtgcttctcttcatctcttcccagtccatacttggcagagctcgtacagggttatcttctgtaatataaatctgaccttgagccttaggcctgccttgaccttgaactgtaaacctgactttgaccttaaatttgatcagaacttttttctgtaagctcaaaaggcttttttctgctggctcagcccttctctctactctccctatgcccctacactgtgtggtctagcagtacccagccccctgtagctctcttactcttcatgactctgtaaatgctaacccctattcctgcacagaatgtggaatgctcctccacaggcagctcctgggtacctggagaacaactatgcacctgtcctccagagctctgctcaagggcaccagcttctgagttctgcagagaagcccctctctcttctgcccaacccctcagtgacacgtgcttcgattatgggactattggcagaggaggaagtggcacacaatagacacttggtaaatattgactgaaacagccatgccagagctgccacacagataggaaatgctgtaattagaagggggagtagctttgggaggcttgctttcaatctgggagctaggccatttctgagcttggcctcagttccccgcctgcattgccatggggcagagggtggagggtggagggtgggggtgaagatacttgccacagggccggagagacatggaaaaatcatcttggatgatttgtatgtctgagcttgaacactttgccttttaaggctttggctaagtgctggtggtttgatcaagtagaaaacccagctaataggtatacattatgggtaggagaaacaataggcaacctagcccttcgggaaagcagtttggcagcacattcatacttttcgaccctataaatccattatcagggaaccagcctaaagaaataattctaaatataggaaaataattattcacaaagatacctattgtaacattatttttgatagaaagtctaaatgttcaacagagagggaggctaaatgaaccatgacagacccatcaaatggaatactatgcagcccataaaatactttttataaaggatatgccatatgggcgattcttaaactatggtacattttgaaaatatacaagttatatttttgccacggctataactgtgtaaacataacaaccccttgccccctaaaaatatctgtgcttagaaaaaggcctgagaaggggcagcaatcaaattaatcagtggtttgagtagcaaaactggaactggaaggcttttaaatgggtatgtactacttttacaactatatttaaaacttaaaaattacccagttggagctaagggagcccattttagttcagtacctttctggtataagttattcatttgtctctgggccttggtttataacatacgggaaagaaattactgttcatccagcagtgtgtgtgccaggctctttgcatgcaccactcagttcagtcttcacaactgaaaccccattttacagatgaagttaaagctcgtggtcagccctatgctaagaactaggtttccagcttgattctgccctaggacaaagcccctgctctttacatcctatcaggggcccctaggatgcctgctctcgggaaaggggagtgagagggacacctgagagtgctatgtccacagagccagtgtaggctgagcctttcccctgagtttattttacaaggtcggggagatcagtgtttgccagcaagtgggaagaagagaggctttagctgcatgcagccagagatggtgctctctgctttacctccctggccccaccagccttttcctgaaaaggatttccccctcagcccaagtagcccattcttcttacctgacagctgggaaccaaccaaaagaacattgcaaggctgcattctcagcctccttgtacatcccagtgccctggattcagagccgtaagcctggggttgcagtcctggccccactcctgatttactgggggccttgggcaagtgccacccacccccacgctgacctcagatcttctacctataaaatgagactcgaccagaaaagagactccaagctccaatgccgtgccactaacaaacaacacagaccagttataagagcaagagctctgttaagaactctgacagaaaggagcaacttctcagtctcagacaatcactgccatgcaggaatgcaggcacagagctgaaagatcttttaatttgtttgagacaagccagaaaacatggattttaaaaaaatatgaaatctcttagtttataaatatcgactgaattggaatacatatacatgcaggtctttaagcatgatacggccgtgggctgccagtttggaatctccgtagtcacctgtctctgagcaccttcctaccccgaaggtaggcaccttctgatacctggactcctggtctacaaacacttgctagggccagtgctgggcagaataggacccggggctgtgatagcaagaaggtcaatctgctgagaaggaggagaaggccctaagtttgcttttctggacccccaggctcgcctttgcccaatacttagccttcaaaggctctgtccagctaccttctagaaatcctatcccagctgtgacatgcaccgtgtaccaagggcttgctgtatatgctcagcagcacaacctcccttcgttgtcatggcagtgattaacctcatgtacacacaaggaaattggtcctgatactgatgggcctgagggcacacagctcccagctgagctcttgcatatagtcattacagcccttagaggggaccctctggtgctattttttcaaagatgaataaaactcttccagctcataacctagcaggagagacaagctcactaaatagaacactgtgtgtagaaaggactataataatataaacaaagtaccacaaagctttcttcccccccttttgttgacttgctaagaggcctacacttacttgggtggtgacatcaacccagatcagtgcacacccccttattcattcagcaaagatttattgagggcctgtggtggcctgacactagtctaggcataagggactaaataaagcataaaatgggcatccatccttacctctctggagcttatattctaaagacataaaataaatacatacataaatatgttagctgttgctaaggacggtggagaaaaacgaagcatgggaagaaagaggagtgctgtaggaggaggggttgtattttaaacacagtggtcagagaagattcactgagagggtgaccttggagcaaagacctgaagcaggagagagaatacacggggcagagatctgggagaagagcattccaggcagaaggaacagcatgtgcagaggccctgatgaggggatgtgcaagaaggcagggtggctagagcagagtgaatgagggggagaggtgatgaggtcaaagagataagcgggggtcaggggagggatgcacagaactttacatcagccgaagaaaaggctttagcctctattgaaaggaaggaccgttggaggggttttgagtagaggaatgacctgatccaatttgtgttctaaaaggatccctttggctgctgggcagagtttgtaggagataatgagacctgcatcatccaggagagagatggtggcttggaccagggatggagcagtgaagatgccgaaaggtgtcagattctgtgactgtgtcgcctcagtttccttatctgtaaaatgcatacactgtgcagggaataaaagctgacaggcttttctgatagacgtgagagtgttggcctacccgactggaatgatgggattgccattaactgaaatgagggaagctgcagaaaaacagatttttaaggcaaaatcagaaattcatattttggatgtgttaattttgagatactctgttagaccaaagtggcggtgtcctgaaatcctgttgtttggtagacaatgaccggtttagggtttttctttccttttctttttttgcaagtagacttaagaaagcataaaatgaatctgtagtcaggaacctctcagatacaaacgagtatagtatttcagattaagattttggacagggagaaagatgtaatatacatgaataacattgagaataagaatatattcaggcgaataaataattactgctatttacggagtgctgtccctatgccaggtccttgctaggcatttcacacgtgttattgctcattgtgattatactcatgcacaactgtaattagccccatttgagagataaggagaatgaggcttagaggagtaaagtggcattcccactgtcataaagatggtgggtggtggagtttggaattcagagttccaaatccagtcatattggatctaaaattcagttacatttgatgttcaagccgtggtttctttctgtcgggttagtctgcctgtcagcaaaaggggaaaactcgttctgagatagataaagggtggccgggtgcagtggctcatgcctgtaatcccagcactttgggaggccaaggcaggtggatcacaaggtcaggagtttgagaccatcctggccaatatggtgaaaccccgtctctactaaaaatacaaaaattagccaggggtggtggcaggcacctgtagtcccagctactggctgaggcaggagaattgcttgaaccctggaggcggaggttgcagtgagccgagattgcgccactgcactctagcctgagcgacagagcgagactccatcttaaaaaaaaaaaaaaaaaaaaaaaagataaagggcctttaaaataggacatagtagtttgtagaatctcccttttaaaacattttagaatgcttcactttggctaaattaagaggtagggcagcttctccagagaaggaaaacttattaggagaggcatttattaatcacccaccctcttccagcaagtgtgagccacactgggcattgttgaggccctggatcttattgaaggtgaaagaattcagcatggcatgggaagtaccacggggaatcaggtggacagggatcagctgctgaggacagcagggcagctgcagctggagagggagaagggagctgggaggagagatgaaggagctgctgtgagataggctcctgggctaaaacaggcacagttgggtgcgctgggctccatgtctccctgctgagcccctgggagctgcaggaagatagatgaaccttggcttccaacaggagcggcatgcctggaactgttggtgggattagaatgagctggccctgcttctatggctccattgtggcctttggcaagtcttcacttttctatctagaaaatgtggcagttgggactcgattgtcatgaaatgccaggagagcaagagagagtgtgtgtgcacaagtgacagggagagaatgcaagtgcaagagacagcgtgagtggttttatgtggtttcttgttttgtattaccaggaacgaggaagctctctgatctcaggctgggtgggggctttgtctgtggaaaggggctgtcgtcgcaggcagagcagatgacatctccacatccctttagtcctttggtctgtgtgttccatgtgttcttcagtctgacatgagcaaagcacagcacacacagggcaactttggggagctctgagggcaccatctttccttgggacccactttgccgactcccagtggaccatcatcttgccctgcagccaaccccatgcaaaagtgttccttttaacattccttttagggagatctttatttctcccaaagaaccaattttcttcctgccctcccataaccatgagaacaataagactgagcatactttcccttttggcatcagtggccaggaagcttggaattgaatctcaatgtcattattgccaccatgtatttgtggtcagcatggatattcccttcttccctgggcctctgtttcaatgcatattttattgcatgtcatttatgagctgccttaaaatggtcaggacttctcctgtcatacccgtaggccttccttccaagatttctttacttgaaaaggttccctttgttcttttttttttcttaatttttgccctggtgagggcaagggttgtggtacagaagcttcactgatagattcaggagtctagccccaagcccaggctctgtccctgactttctgggtaacctcaggcaactaacatgctttttctgggtttcagtttctttctctatagaatgataggttgtgatgaggtctactccagatcctttccattctgattctgagagtgtgttagtccctgttggtacctggggtaaatgccaggggattaggcatttacctaatcttacatccaggatccaaagaatcaaggcagaaatctggaaaaaatgagaatttttagggatggaagtctcaccattttcctcatcctgtgatgctttagagttggaagcttgggagaagggggaagggagagaagccggactgaggcttgacagctctatcagtcaggaagcccagggaagcatatgctgtggccaaggttgctgaagggcctccatctgccaggagccactagccaggcagccaccaagctggggctggcaccactgcccctccgttcctcacatttctccatgggtgtctgcagaggggcagccgtggagcagctgggatggtggaagcatgggaaccagtgttccccctactactccctacccagacgggaggcctgccagacattgccctggaaagccagcccaggtcacttggcctagcagagtttgccagtcatttcagagtcactcatgcctgggcctgctgatgtccgctgaggtgataaagcaagaattatttctgaagaagggaaaaagagagatctccttcgacaggtaatagtgatagcaagaaatgttcagtcctctaatttcccaagaactacccccatccctccattcattaccttggttggatcccaaagagacagcagggccaggaaggtggcgccttcctgagtgaatgcatgagacagctgagacgaacagaggtcaaagacccaaggtcaccaagatggacgatgtgatatggctcagaggagctgagggtctctcagtggtgggcttgcacagcagctgggctgctgggtgggacgcagcagttgttggaagaggaaagagcagtgctcctcatggaaagggcttctcctttgcctgcgaggctgattcttagaggaacagggaaagtcactagttagggagaaggcacatgaggaatttctttttctttttttctttttttttttgagatggagtctccactctgtcgcccaggctggagtgcaatgtcgtgatctcggctgactacaacctctgcctcccaggctcaagatattctcctgtctcagcatcccgagtaactgagattacaggcacccaccacctcgtccagctaatttttctatttttaatagagacaggtttttgccatgttggccaggctggtcttgaaatcctgacctcaggtgatccgcccacctcggcctcccaaagtgctgggattacaggtgtgagccaccgtgtctggccaagaatttctttttaaacgactctctgtagtatgcttacctcttatgtctgtgatgccctgcttttatggaagtatgaccagcccaaaatgcaggtatatacctgctcatctccattgtggtatcttagagtctcatggaaaagtaggttttttcttttatgcagcagaatgataagtgtcccaggtctactgtattatgagaccttcatgatgcagtagaaatgcaggtgcccatgacctggaaatccagggtccagcccttggtgactcttgtaacctctgaggcttcaggtttcccatagatcagatggactagtctctacctggcctccctctatggggaatttgtgtgaggattcaacgaagttgtgaatatgcaagagctttaggggcagcctcagctaccagtctcctccaggctgacccaaagtctagggaagcatcctgggcccagctacctgaagtcaggtagagggggggcactggctcttgctccccttctgctgcaacttgctgagccattctggaagagtctctacccctttctggaccatgcctgtctttttattaatgcaacggttcatttaaatacacacacacacacacacacacacacacacacacacacacacacaatggagtcaggggcatggtggctcacacctgtaatcccagcaactcaggaggtgacgctggtggatggcttgaggccaggagattgagaccaccaagagcaacatagtgagaccccacctttaaaaaaagtaaaaaatagattagccaggtgaggtggctactggaaaggctgaggcagaaggatcgcatgagctcaggagtttgaggctgcagtgagctatgattttgtcactgcactccaagcctaggtgacagagtaagaccctggctctaaaaaaaaattaaatatatatcacatgtatttttaaaaatttgttttttattgagatataatttacattccataaaatttatccttttaatagccagatgcagtggctcacacctgtaatcccagcactttgggagcagggaggccaaggtgggtggattgcttgaggccaggggttcaagaccaacctggccaatatggagaaaccccatctctactaaaatatacaaaaattagccaggtgtggttgtgcgtgcctgtaatcccagctactcgatagggtgagtcatgagaatcacttgaacccgggaggcggaggttgcagtgagctgagatcgtgccactgcactctagcctgggcgacacagtgagactctgtctcaaaaaaaaaaaaattaagtttttaaaatgtacaattcagggattttaggatactcacaaaattatataaccatcaccactagctacttctaaaacgttttttatcttcccaaaaaagaaactccattcccattaccagtcattccctgttccttcttcccttccagtgtgttttctgtctgtgtgcatttgcctgtgctggatatttcatataaatggaatcatgcaatatgcggcctttcgtatctggcttctttcatttagcataatgttgtcaaggttcatctgtgttgtagcatggatcagtaatacttcattccttttatagctaaatattccattgcatagacgcatcacattttgtttatccattcttctattggtggacatttgggttatttccacctcttagctattaagaatagtgctactgtgaagtacacttcttatacaagtttttgtttgagcatctattttccattctttggggtatatacctagcagtggaattgctggttcttatggcaattctatgtttaacttttcgaggaaccaccaaactgttttccatagcagcagcgtcattttacatccccaccagcaatacatgagagttccaacttctccacatccttgacaacgcttgttattgtccatcttttttatgctagccatcctagtgaatgtgaaacaatatctcattgtggaaaataagtattccatagatttttaacctgaaaaatcctttttaaaaagtagtcttacttcacaccttccatatgtaaaacacatacgagaggagcctcttcaggtgaaatgggggaggaggcccaagccacccctcccagtaggtgcagaggcaagtcctcttgggtggtttgaagacctaggcttgatgcccttcagctctggaatctgagtctaatcactggagacacatcctgtgtagcagctgcctcagccctcaacctatgctggttgcctggggaagcttctcacagcatttggccaagttgtgggtctgccttgccgctgtgttggggttgccacaacagtgagaagaagtcggatggcgcctcatgtgtggtcccagctttgagggtggcttgtgtgggaaacaggaagcaagctggagaaatgccagcaagtcctggaaggaagatcctaggttttgttgacaaaggaggagcagaggcacatagtggctgatgaggccatagccagtgcagggtttactgaactcctcagctgtgaatagccctggtagtgctaatcttctgagatctagagtgtggctgctggaacactcccaggcctgtcttctattcccacctctctgcattagcattctaggagcaccaggcactctgctgtctgatgggtggaatgttctgcgttctagtgttaccttggcaaagagaggatccctcccaagttctgctctgttgattgcaatgctctgctttccacagctgtcagtggtttgagtcatcagacacagattgttctgttccctcggattttaggatagctttcttcttgtatcaatggctaattctttgaaagaagataaattatagtacatacagggacttttgcttagctggaatattagattaacccaagcacctggtttttcccccatgactgttgattggggaaaatgctatcatgtctctttgaagaatggagcttcctaattttacatatgtggaaactgagacccgaaagtcctagtaatgaaggagaaagaagcatcaattagaagcccataatttcattgacagctctagaattagagaatgttagatccagagcaccttagagaccatctaatctgactctttggtctattcaatgtgcttgtttaaaccattgtattaccaacagttgtgtgttgattgtgtttgtttttatgaagtttcccaggggatggtgttccctgagttttagtctaaggcatagcatcctaagtggtcaagacagtaagtgataggagaagtcactggtggaaaggctgtgggtgggacctaaagaaagagtgcaatgtatgcctgaggacaggcagggaagatgctgcagatgggacaaacagcccatgtagagatgcagatttgggagtgactagccgaggtctcctggatgtatcagagagccagttggaaaggttgtagatgagagggccttaagcacccacatcaagagctttgctctgatttttacctaatctgggacttccaaggaattttgaacagggtccaggcccttttctccattgttcctgccatgaccctggcccaggccctcctaatttctcccctggttggtaacctcctaactggtatctggtatccctccctctccacacaggctccttatcaggaactttctaaaatgcaaatatgattgtgcccctttcctataaagcacttgcatggcttcctgttgcccacaggacaagatcctggcttaagtggctctgtgtggcctgcccccctccttctgcagcctcactcccactgtacttctgccctcaacaggctccctagtttctgagcagccagctgtcactcactgcctgtgtccagacttctccttccctcccattttctgctgccacctggtgaactcttattcatccctcaagacccagtgcaaatttcttgtgtagagaagcgttcctggatcctcctgaagacactattatggcttgaatgtgtttctgttttgaagctcacttcatgttacttccaaaatactggctgcccccatgttttagtgtttattgtgtgataggcactgacctaagccccatactcacattattttatgttattctcacagtaaccatatgaggtgcattcattagagccccagttattacagatatgggcagtgaggctcagagaagtgggtgacttgcccaaggcatgcagctgaagggtgccagagctggcatttgagcccagatcagttcatattgacttctgcagtcattagtctcatgctccctggacccccattgtcgggggggttaggaagtgttgagcatttgagggagcagtcaaaggagtggatgcagcagggttgctatggtgtggacaagatggggaagtggagggaagttcagtgagggcaggggctgggtttactctggggttaaagtgatgagagactatcagcccagcttcccacagttaagggttttctttctaccttcctttccaagtggcagcctctggccacctggggagaggcctgcgggactccaggctaagcaggtggcatggtgacaaacaccatggcaacctgcctccttgctagggcctagaagggagggaggacctgagagagcacaggatgcacactgagttttctgagtaggatcctgagaggtggctccctttgggcctgggtggcttctgccctcccatgagggaccctgcctgcaaggtcccatcccagcaggggaaatgcgtcttccacctttgtccctaatgaatacctggctctgggtgcccaggagactgttagctatacgcaggtacaagtgccacccccttccctcccccaggccagggaggaaggaagagggaactcaagaggaggcaggtgtggggtagccaagcaagatagtggcagggacagctgggacaaggccctcattgtagcaaggccacacgcagctccaagacaaaccaggcattttgcctgcctcccaggactgggcctagcactctgcctggactttcctggctccttagaacactcactcacactggcttggaagagcccatcctcagatctgagtcctgcctctgctggaaagtcctcctgaaggctcagcctcctttttgcatcctcccaaaagccagaagggcagggatgatggtgggaaagttgttggtgaagccaggccgacctgggccagaagccagagcatgtcacacctgcagctgtgtgaccttgggcccaaatgcagtaacaaagccggccttgaaggattgctgcttcaagtaatgggccaaggcagacgagagcactcagcatggccaccttaccactgaaggattcaggcaatggcaggtgatccttggagcccttgcccatgtgcccctctgcaccctaagctgttcctggtcaagatcctcctgtgcccaggaggcagtgagccatttatggccatcctcacaagcatggaggagcactgatgtcctcttacccccaaatcgcccctcctccatggttcctgctctaggggccagccctacagttccaggaggccctgcctgggtgactggggcataatgagtgggaagcattgccaagctggggcaagaagctcaggtgacaggtgtggtgtcggcaggtcctgcagcccagcacccgacacctccaggcagacaatgctggctgtgtccagaccctccaggggaacaggctgtgttctatgtccccgccaggaaacaggccatctgagtagtgcctttgtccactcaggaggcagccccgccgctggctgggatgaccaggctccggggaggccctgacatgggaagggggtggtccccgggccagagactctggggtttgagatccagcccctcagcatctgatgttgacctggtttcgatattggctctgccacacacctgggatgtgacttggccaagtcccttccctctcggtggctcgattcctcatctgtaaaaggggactaatcacagcacttcctcatagggttgttgagaggagtcaatggcataatgtacgtagcgtggttggcacgaggtctggtgtggcgtggggctcggtgaatgcttccctccagcatggggagaggtccaggcatgacatcctcagccaagtctcctgtaacccaggctgctgtcctcagtccctgctgttaatgtggaaggaggggactgaggtctctggagctggcacaggaccagcacattggctgcaaagagcccaggttccccactctgccccagactccggtaactttgggctaatacccagtatagccctcctcacgacagccaaaatccagcccagcatggggcctctcccctccttaaatcctggaaaggctgcccttggaacccaagcctctacccaggaaagaagcctaaggactcgggggcaggaaccaggggcttgagtctacctgcccacttagcaagaggcccagtgatgggtctctctaggcacgaacgcttcctcctgggtccacccactgggacacccccagcggagggcctctgctcccacccaccccagtgctcatctgctttaagtctgtgcccctacattcctggtagatgccaaaaccagcatgcgcattacatgggtgggtgcggacatgcctgtgtgccgcatgggtgcgggaggacctggctgcatgtcctgcgtcatgggctggctgcctgagcacgttcatggagacgcgtgtggcatgtcttggaatggcagggacatggtaccttctcgtgttggtgtgtatccgtatgtctttctacacatgtgctggtacgttggtctgtcttgtctcccctgtagacgggaagccccgaaccacgggccaactgggaagttgatggtcggcgagaccagcccatcctaatttggggttcctggtcctgctccaggagtcctacagcctgcagcccctaccagagagggaggactgaacagcaagggggtgtgtgggtctgagtatcagggtcctggggaagaagcaggcctggctcgtagagtagaagactcggtgccggcagtcaggaggccctgctcctgaagcctctgtgaccttgggcacggccttcactctgtctggggcacattcactcatctggagaacacagggttggactgattacttttagccactcctgacagttgtggttttaagttgggtggtgggaacctgtgcaccagccctattcaattcactggtggaggcagccgtggtctgccaggccctcgctcctggggtgtcctgccgaagggtgagaagagaagccatgccgggcagcggccccagcgagaggatgacgtggcctggcccggccctttctgcgggccccccaacccgccctctctcctcagcccccgggataccgcccatcccaccccttactcggacccacagcctcatggccatgtccctgccaggaagtagacggacctctgctggatcacgcaggtgagtctccccctcgctcacagcctaggcttcggagggcgggaggagggcgcacgggcctctctctacctgccaccaacttgcagtatgtgtttgagcaaatcatttcccattcccatctttaaaatgagcttgctaacacctgcctcctcctggaactatttaatggctcaaatgacacagtggatgtgagagttctcggaaggtgtaaaccactggattcctaccagcagtagcctcatcaatattgtttgattttcacaacgactggaggggaatcgtgcagtcatccactcagactcacttggtgtcccttggtttttacccccgaggctcctcctcctgtccccacccctgtctgccccattcttctccacctctgtctcagtctatgcagggatctcctctcctgggtttggggaaccccagaagttgaggaccttgataagagcatatgaggccccacccttgccctgcagccctgccggcccccattcttgtccctggggagccaggaggaccagccttcttctggttttccatcttgatttgcactgtctgttctgtcacccctgtctgtgcgtctctctctccctgcttctctcccctgtggtgaccccaaagcgggggcactttgggccgcagcggcctggcagtgttcgcccagtgtccgcagctgcccgccagccagaacgagcacctgcctcttcttcctgcctccaggcgcacctctccacctgtgagcgtgcgggatgcctacggcacctcttcgctcagcagcagcagcaattctggctcctacaagggcagtgacagcagtcccacgccaaggtaattggcccctcctctctgggcctggccctgctggctgggaacaggttgtcctggggtgggagaggtaagggagcagggtcgtgttctaaccacccctgacgccagcatagccgctggccgtgtgaccttgagcagatcatttctcctttctgagcctcagttcctgtctgtaagatggatatgataatatacagctggacataaaaaaatacagtggcctaaacaaactaggggtgatacttgcagaacaaggagccaggggtcagcagctccctgaagtgtcagggaccctgtgtcttctcccgctgctccaccatccttggtgtacagcttttgtctttgtcatcacaggtggcttctgtacctccaggcatcaggcctgccctccaggaaggaacaggtggaaaggaccaaagcccttctcagagattgtttttctgagagggacagcttgcccccaaatcctgccagttcttgctggccagaactgggtcatgtgaataactctagctgcagggccagttagtgtcttccccacaacagtaccaccccagacaaaatgggggttccgctaggaagaaagcaagatgagtattgggaagcagcctgcagtgtctaccatcatgcacttctcaggggaacactttgagagtggcagaggtggaactggcttggaaggcgaaatgttacgaatgcagcagatgccaagttgtagtcttgagtgaggtgaactcggactcacaaagcaggatcatgttggagaagcaggtgtaggggagctgtaggtccttgaagaccaggaaggaagagctgtcatggtaggccttgtcctgcttccccagcattgaaatacaagtgggaggttggggcgtgtagggaacgagcataggctctggatttggtctcttcctgtcttgagcctccatttcctttctttaaagtggagctaataactcggaagcttcggtgacttgatatctacacaccgcctgtgcatcctagttggccaataactgatacctcctgttgttagagctttgatctgacttaaggccaggagatgcccagcctgtggctcccatggctggagcacctcctgggaggactcagtggagaggatgtcatttgtgtgaagcgatgtccagagccactgaaacagcagctgttagatttctatcgtgacacacatgatgggtaacacccatgtgcaggactcatgccccagcatcctggctgtaacaccaccccagagactgggggacataggagtaaagcattaatttacattttgaaaactatataattggcaactttaatcttttctattagtaacagattttgtaacacacctcgtaactgcagcccatggaggtgatcccaaccccagggctgagaattgctcccagcaaagggtcttcttccccacaacaagggttgctgcccctgggtgagcagtggggccacagttaggtcccctctgcaaatagccaggctttccaaggcaggaacagctgagaaacatgcgtcacagcgtattttttttctaatttgtgtgtgtgtgtgtgtgtgtgtgtgtgtgtgtgtgtgtgtatacatatttttttttttacaaagagctagtgactaaaaatgtacacgtgttaaattttatatcggggaaaatattcatgaaagcaaaatgaaaagaatgtaaaatagttacttcctctctaatcctcaatccttactagtttagctaaccttgggtcccccactcctaccaccccttgccaaggggtgactcctccgccccttgccaagcagagaggagacctgcgtgacttggcttgagttgacctaggggccatgacgtgagtacatagaagaaaaccacttctcattccacttctatcaccactttctctttgacagtttacgacttacaagtactttttcctcggtaaacaccatacagcttccatggaacttttaaaattgcctccagctcggctgcttcagcaaatgggcctcaccagggcctgccttttccaggctcataaagggacattgcccctccctagacctgccagtcactctcccctcaaggagcagagttggatggcaacaaggcctgagtctctagtcgcgagatacatgcccaggttttaagccaagatccaaggtttctgtttgagcaaaacaaccagcagccaggacactgagaatagagctggctgggccatagtctgttgtggaattggggcattctccttccccgtgaaagcctggccctccctcctccactggcacctgactgccctctgggtggaaattccttctcctttgccctggtagggcaccatgtcagtgccgccctgtgctgggagcagtgcacttccagcctgctgccaccccagagtactgcagtggacaggtccctgcccagagccggcaggtgttcacgtgtgtgctcccatgtgcccccggaggtgaaagtgtgaacatgtgcctgggctggtgccctagtatgtgtgagtacctgcgaggcacaagtgtgtctccatgtatgtgggcatgcaggtgtgaatggactgggaattgacatcccaggaagtgtgcgtgcatgtagtgctcacccacgtgtacgcagtgggggtgaggagtgagagtgccagggcgtatatggagacagctgtgcctgcgcgtgtctgccctccctgtccccaggctgtgaggggtctcagctctagagaggagagcttctgcctccacctgggagatgtatcctgctgtgtgggggtgagtccttgtctgccatgcagacccagcatctgccacttacacctcagtttccagccttcaaactcattctccaggttggaagacgaggtacctgggttctggggcacactaccgggattgtctgaggggctcggggcaagagctaacctctctgaggccagcggcccctctaaaagatgaagacagtccctacttcagggctgctataaggattgatggcgttggtcaagtgcttggcctggttccaggtttacacatatgctctgggatatatctccccacccagccctaactagaggagccctgaagcccgcttcctgacatgatggtcttcacttagaggaactctactaaaacccaccttccagaaggctgggggttctcctgccttgtgtgggaggcctggcttggagcatctggtggccagggatggtgaggctggtgtccccttgctccccagaggtaaagcacctgtgccttgcctgacctcttcctccctccctgatgatgggcgtccccttgcaggcgctccatgaaatacacgctgtgcagtgacaaccatggcatcaagcccccgaccccggagcagtacctgacccccctgcagcagaaggaggtgtgcatccggcacctgaaagcccggctgaaggacacacaggaccggctccaggaccggtgagcgggtggccacgagcagccctgggggtaccccaccagctccacactcagggaaaccagggctctggggtgcctcttggagggaggagtggctgggggtctcccagcatccgtctgctctctccttcccagcaaagcctcatttgagcccacttgcagaccctcatccccagcagctactcaccttgactgctccacgaggctgttgggggccaggcgggagcagtttcccatgagggcctgtcctgtggggcctcctgcctgtgctgtcctttcccagcttcagcctggcagctcctttggctgcttcttttcctctggctcccatcttccaggagttggagcacagggcttctttctgacttacttgcctcttttgggggagaaacaactctttatccttcctcgcttcctcctgagtgagtcaccagagggcttgtggccaacctcgacttcaggccccagaagccatctacttcctgctgtggaggatgatgatgagaagccttttgctgagctcctccccagcccaggtgtctcccaggagcccccgcaggccgtctgagctcattctcaagtgcttaatcccaaccctcccagcttctaccctccaagcccagtggcttcatctttgtgatctacacttcagggcgtcgatctcccattgtcttaactatccttctcgggactgtgtctatgcaaacatgcagcctattgtgagctggccaaggtgctgtgtggggctggagctcagagcaggcacgatgatcgctccttttttcttttctttcttttttttttttaatacagcagctttattgcaatgtaacttacataccatataattcacctatcaaaagtgtacaattagatgattgttagtttagtcacagaattttgcaaccattaccactatctaatttcataaatatttctatcacctcaaaataaaccccattcccattagcaatcaccgccaatttctaatttcatcaatatttctatcacctcaaaataaaccccattcccattagcaatcaccgccaatttctaatttcatcaatatttctatcacctcaaaataaaccccattcccattagcaatcaccgccaatttctaatttcatcaatatttctatcacctcaaaataaaccccattcccattagcaatcaccgccaatttctaatttcatcaatatttctatcacctcaaaataaaccccattcccattagcaatcaccgccaatttctaatttcatcaatatttctatcacctcaaaataaaccccattcccattagcaatcaccgccaatttctaatttcatcaatatttctatcacctcaaaataaaccccattcccattagcaatcaccgccaatttctaatttcatcaatatttctatcacctcaaaataaaccccattcccattagcaatcaccgccagtttctaatttcatcaatatttctatcacctcaaaataaaccccattcccattagcaatcaccgccagtttctaatttcatcaatatttctatcacctcaaaataaaccccattcccattagcaatcaccgccaatttctaatttcatcaatatttctatcacctcaaaataaaccccattcccattagcaatcaccgccagtttctaatttcatcaatatttctatcacctcaaaataaaccccattcccattagcaatcaccgccaatttctaatttcatcaatatttctatcacctcaaaataaaccccattcccattagcaatcaccgccaatttctaatttcatcaatatttctatcacctcaaaataaaccccattcccattagcaatcaccgccaatttctaatttcatcaatatttctatcacctcaaaataaaccccattcccattagcaatcaccgccagtttctctccaaccaccatagtccctggcaaccactgatttttctgtctctatggatttgtctattctggacatttcatataaatgggatcacgctgtatgcatgaccacatcgttcttgaccacagctctgccaagcagccaatccggtttggatttgttgtggttttaaactacaggcggttacgggtagcattcagcgagcttcattgtcggcagagggaggatttctatttttattttccctcatcttcccaatgatgcccaggatctgcgtggccttttgcactaatgcctcagggagcagatggcccatctcccagcttcatttctagggccagccccatggcttagagcagaccatctgccctgtgtggtttgggcaggatgccctggtgtaggtgtgctaacaccttgactccctggtcactgtctgcctgttactcccacaggaacccattgcaggtctttacatgaaatactgtcactctccccacactctctccatatggagtttcatgcctgtgcttcctgcagtggcccaccttctgttcctcaaagacaccatggcttttgcacctctgtgctttcgtatctgtgtccccactacttgagatgccctgccttctatcttgctccctgggcagacttacccttcaagacgcacttcagatgtgatgcccactgaggcgtggacagggctcgaagccatggctccctggggtttggctgggccccaaggagagagaggcagagactggctgagcagatcatgcccagttccttctttcaaactcactctttctcccagggtgaggtgtgagtgaggagcagggtgagaggccaaaagggttacctagagtgggccccccacctggaggcaggaagggtgaaggccaagtatctcctgcccctcagtacctgttgccttgtctgttattggcactctaagcagctccagctgtgtcctgatgggtggatgggccccttctaggtgacaccattgctgacctttatggccactgcatcccctcagcccccagtccctccagcgtattgtggaatgagattcctgggcccatttcctgaaggaaaattctgatctggctttgaaaagtatatggtgcttgatctgggacggtcattctgctgggctgatgaaccccagagtgacaggcacggcatttgtagattttacggatgggaatgtagggtttaggctgagggggctcatgtgggctgccactaggaagtgagcgaaaatgcccaggacagggtttgacgtctcctggatgattttccttcttcctcactggtgttaatcagtcgccattctgtctcactctggttttacctctagacctgatggcatatttttctaacttacctccctccccttgcacccctggattcatctgtgactcgggaatttgaaaagcctgagcatttctggacaagagtctgccgactatcttgttcacctggtgcttgcccccgtcgctcaggagtaactctatgcctttctcgttgatcttttcagcttttcctctttaagatacaagatacaaggagatacaaagatacaaagaagcttctagcatggatagatgagagccaccctgttcttatcactctcccgttccacccaccacttctcatcgctctgcatgagggatgatgtaaaatcatcagcctcccccaacattgaaagctgtcatttctctcccctggggtctctggccaaatattcctccactgaaactttctgcaacctgctttagtaggtagtaggaggctacatcactttctatagagcagagatttcctgcctagtttttgttgtttcacattaagattttattaggtttttatagcagtagctataaaacttatgagcatctttgttgtctagtctcttctctagatgatggatttgaatgttgagagttgtcggcattctgggggtggtggggtgggggagggaatgcgagtggtgtctcctcccaacctttcttctctctccaggcagaggcttctcctgtcttcacccctcagcccctctccccagccactctcactccccactataataagaaggcattgagtttgtccttctgttttgggttctgagccacagcagcacagggcccttcatccttggcaacagtgtcctctccctgcctctccttggcggtgacagaccaggcaggcaggcagtgagcgtgtgtgtgtctcctcggctcgcagggacacagagattgatgacctgaagacgcagctgtcacgcatgcaggaggactggattgaggaggagtgccaccgcgtggaggcccagctggccctgaaggaggcccgaaaggagatcaagcagctcaagcaggtcatcgacactgtcaagaacaacctgattgacaaggacaaggggctgcagaagtacttcgtggacatcaacatccagaacaagaagctggagacgctgctgcacagcatggaggtggcccagaatggcatggccaaggaggatggcactggggagtcagccggtgggtcccctgcccgctccctcacccgcagctccacctacaccaagctgagtgacccggctgtctgtggtgaccgccagccgggtgatccctccagcggctctgctgaggatggggcagacagtggctttgcagcagccgatgacacactgagccggacggacgcgctggaagccagcagcctgctgtcgtcgggggtggactgtggcaccgaggagacctcgctgcacagctccttcggcctgggcccccgcttccctgccagcaacacctatgagaagctgctgtgtggcatggaggctggtgtgcaggccagctgcatgcaggagcgtgccatccagacagacttcgtgcagtaccagcctgaccttgacaccatcctggagaaagtgacccaggcccaggtctgtgggacagaccctgagtcaggggacaggtgcccagagctggatgcccacccttcagggcccagagaccccaactcagcagtggtggtgacagtgggtgatgagctagaggccccagagcccatcacccgtggacccaccccacagcggcctggtgccaaccccaaccctggccagtcggtgagcgtggtgtgccccatggaagaggaggaggaggctgccgtggctgagaaggagcccaagagctactggagccgccactacatcgtggatctgctggctgtggtggtgccggccgtgcccacggtggcctggctttgccgctcccagcggcgccagggccagcccatctacaacatcagctccctgctgcggggctgctgcactgtggccttgcactccatccgcaggatcagctgccgctcgctgagccagccgagtcccagcccagcgggcggcggctcccagctctgagggggcccattctggcagcggcgcctgcggcctgaccactgattgtagggatgccgttcccccctcccttctcccatgggcatcatcttatttatttagttttgggtgtggaactgtttctttttttcaagatgttaaaacagtcccgtggaaggagcaggggttggagaaaggcatcccaaagcttcgatggagagcagggaagggggacccaaggcaggaggtacaccagctggacaaattgcagggaggggagggagcgagggccaacccggcccctctgtccccttggctcttcagacagggccagccctgctcaggaagtctctggctgtcttcatgtggggaagccgggcttgagttgcccataggcccctgccctgcaccatcctgtccagtgccctgcgcactccatgccgtctcttccaagccaccttgcccgcagcccaggctcctgggccagtgctctctcctcaaatggaggcagccatggcctgaagtgcagatcactgacccagggctcagagcagaggccagaaccactgggccggccggcattccagcctccccagactgctgcccaccttgggactcaggagctcagtcaaggccacaggctggaggagagacggggctgggcgcaaggtggcggagggcagtgtgggttctgtgtctgtctgttcatcccaggctttcccgtcatccctttcctcttggcacttctgggtgtgtcagtcattattcctgtgaggtagctaagcccggcaagctcagtgctggggtaggagggcctgcctgagtcccagctcccagctggagaatccaccagcacaagaagaggaggcaggggcagaaacccaagggggctcccccagccttccaaggtgaggccatctcatctgcaggctgggaggcagggctggactcaggaacccacagcttactgaaaaagccagaggccatgactgcccccagaaacttgccccgagtttctctggggccctcgggcccaacttctgctttgcactatgttcactttggggttggttctcagccatccaagggtctccagtgaggtggctgcttgctgtctgagatgagggttcctaaaccttaaacctctctgcctctggaggagggtggggtattctggcaggatgaatcgcaggatggcgcgtactgaagccacgatgttcatccaggccaaagcagggtgtcctgggataggtttcctaggcaggggcgtggcagagcaggtaggcgccctgcagcctccctgctcccagcccaaggccagtcggcctgggaagttcactgccccaactcttttcccgggaccatactgagtcccccagccacgctgctgacattaccattattattttaccaagtaaactcactccttttcccccacaggggttacacccatctggttgtcccacccactcttcagaggctaggccccacctctgggggttggagggaccctgtgtcttactcgcccctctggcctaagggccactctggttatctgccaaggttgcttgccctcaccccaatgctccaacagccattgcctaactcatgggctctgcccttctgctcggtgccctccacgtgaggcggggcacctgcatgcactgggagggggcggctggcccagccctcggggcaggagccccctctgccacacgctttgtgcctccaaagctccccccgccttggtcagggcctcagaccagccaacctttgtggaataagccccagcccagccaaaccaaacccagatgcctgaggcctggctggggctgcccccgcaggacactgtggccatgccacggagggggcagtggacaaaaccaatccaaagccaagccgggactggctgcggacccagcctcctgtgccgcgcactcacggagctgcgtagtctcctcagacatagtcaaagctttgccgagaaaagaaatgtatgaactatatttgacaacataaaatctctctatttttcaccactggaatttagtcaagcttcaggcccctctgctcctgtctgtgtcttgcgtctgtggccttcctattgtgtcttgtgttttggtggatgtgacagggctggggccacagtctactctgtctctgctgctagagaagccacctgtggaggactgggctgtggttgggcctgaggcctgtggaggaggtgagtgtagccagcagcggccgtctactcctgttctggcctgagaccaccggtgtgggtcacgagggccctggcccacagtgttgagggtcctctctttcgggggctctcctggggccttcgatgggcttttcttcttgtcagtggagggagcagctccccactcagccctgggacaggccctgggactgtggtggccggtggccctggcccagctctggagtgcatgtgtgtgtgctcagatcccgcatctatgcaaaggtgcaggctgcctgtgaggctccaggcggtggaggtgcggcagctgctgctcaggtgccatgccctgaagaggcagggtacacatggggctgggagggcaaagatggggcggggcctccccctgagagagctcaccctccacagtgacccttttccttcctgcctaatacctcctcccgttgggctgtgacttttcctcctgccctcagcctctgaaacagaaatctttggggcctcccctttccccagcgtctggcaagagctgatgaggtcctgaggaacagtgtccccaggaaccaccttctggagcctagcggccagacgtggcttctcctgagttctagggctcgggccagagtggcactactgcccggccagtccaggctcaggcaggaatcggacgctggggcccgggctctgcacagagagctgggcttgagtggagtttattgtagatttctcccaaggggatcacttagcttctcactgacacacccttcccaattgccacaagcgcaggggtatcttacagcactttggggaggggtgggacaaactgcaaggttctggggccaaggcctacccaggggcctctgcccagagaactcacaaccccctctctgacctgggggacaatgcaaacaggtcacagtgcattcccatattaggccatccccttcacgaagaattcaggggatgtgggaagtggggaggcggggagggatcttgactcttgtctcctttgtccttttgttcagacagagttgtacctgcagcagacaactctgaattaaagcatgaaaacacagcaagccccttggcctgttttctttatactgggtggtttctctaaggggaggcagtgggagggttcacaccatcttcctccagcgcaggggtcacaacacccgcacgggaaaaagccacgtgggcagcgatcatctctgatgtgcagggaagcagagagctgtgtggggctgaggcaccactgccctcttggggtcaggctcagagtctggagccacctccccctgcccccacatggcacaccctgctgggcgccatgagcacatcgcgtctcaccttccccaacaccccctaaagtggcttctcatgcccactttgcagaagcagaagcagccacggtcacacggggggtgccccaaagccagtgctccctttgtcagccccactgccccacagtcctaccccatccccacagttccatcctgtccccagttccagtcatccccgcgccaggctggcaggtggcacgtgacagaggcagagccaaatcatggctctcagaggccacgcgtagaaaaggccctggtctcaccacggtttaagaggaaaccagccctggcacgtcaggggaccaaggattccagaattttcagttacctttttattttattttcaatagttttgggggaatcaattacctttgcggacagggttttgtttaaaatcaaatctttattcaaaagatagtcaaggctgacaacttatgcagtctgtgacaaagagcaagtcaaggcaaggaaaaagctctcacaaagaacgtagctctgttctcttaaaatgtgtaactgttttcctggtagagcaaaatttcttgaaaggggcccagttgcgactttaagcagcgtttaaacagcctgcctccgtgtccagcatttaaatcagcacaagagaatcggctgcctgtgggccctgcctgagcctcagcctagcttggagtctgaggctccaaggaggcctgtgtgtataagccatcccatggtcaccctcctggacacgcccccctcatggcagcccccaccttaagcagcaggccggctgcaacccatcatccgagggtggttgccctttgctgcaggagggcgggaagccccccctgcctgccctgccctgcagtggcttcaggcatctgggatggagtggtccatggtgtggtggagcaggactggaggcaacctggatacagcaacaacagtgaccaggttggcagctccttctctccaccctccagcaacctccacccccttccgagccagtgcatcccatgtgggccttcactcccagttctaagactttcgaatcaccagaagccacaagctaccttggagggaggggaagggaggatagagctggctgagcctgtgccctgtgtcagcactgagaaagtggaagtggctgagccaggtgcacctgggaggccgggaggtgaaggggatggcagaggaggggtgaggaggggtgaggaggggtgcagccttactttttgaccatgtgctcgtagatcacactggggatgatggtcagggtgacaacgttcccagccgtggccagaatctccatgatctttttgtcctagggaggaggcaagtaagcgatcaccctaaggattggggaccaggggcaactctacaggcccctctgtggagggatcagcatggccactgctagaggacaccactgatggctgactgcagggcagggctgcctcggaccccgagcctgtcagatgagggtcccagcagactcccaggtaaggtcttgcttgagtgagaacatgggtctcccacctgaggatctccttggtcaaatgagcatgcctcttcccaccctcagcttgaaggccagcggtgtgagcctgacgcgtaacagggcctcatcaatgcgattctcctcccccttccaagggctcccagagactcaccaagcccacagtcacatttgggttctggcctcaaagcataaatgcctccccatcctgtgggaggtactaggcgtacccatccaccctctggctcctgctgcctccagggccataaggatcctcctcctcttacatcctcttacatttgcttgtttgataaaaagagatgggcctgcagacaccacttagatcatgggaagaacaagaaattaaaagtctctacgcaaagcgtgccaggtggtccaaacactaacgttatggccatagaagagcctctggccctcactcagagcctattgacctttacattacacatgtatgttatctggttatgtgttttcttggttgttcgaaaataaatgtgagaagatgtgctagacaggactagtgatggccacaggtggaaataaactttgaaaagacaaacgatctcaagaagtgtggctggctgggacaaacccagttctgaagaacctcacgaccccatggatttctgaataacgattttctaaaacattcctaaactactgaacatgatccactataccaaaaaaagtgccatacagagcaaggaggtgtccatgcagccagcaatagctattatgtattaagcacctgctatgtgcctggcactgtgctcagagctctaggtacactgtcttttttttttttttttggagacagggtctctctctgttgcccaggctggagtgcagtggcatgatcatagctcactgcatccttgacctcccaggctcaattagtcctcccacctcagcctcctgagtagctaggactacaggtgtgcaccaccacgcttggctaattttttagttttttttgtggaaagagggtttcacattgcccaggctggtctcgtgctcctggacttagtgatcctcctgctttggcctctcaaagcactgggattacagacgtgagtcaccgcacccagccctacgaacaccgtcttactgaaccctcacagcaaccttaggaagaggatgctgaggctcaggtggggtaagcaagctgcccaaagacctgagccctcccaccacccggcagtccctccctggtgcggccaccagcctaccttcagcccgataacattctgcccgtccacctcacacacgtagtggttggtgaggagcccgttgcgggccgcagaactccctttgaccagagagacaatcttccccttcttgatcacgaagccgacgtggcccatgctgtccttgtgcatggtgacagtccgctggaacggcctggcaggagggacagtgagctgtcctggggacatggctggggtgagacggagaggctgcccgggcctggctactcacctgtcccgaaccaccacgacaatcttatcgcctgatgccttcttcaccacctgatgggctttgtgcgagctccacccagcacagtcacgcccgtcaatctgcaggagctggtccccaaagcgcagccccacaagggatgcaggggtgttggcctggaccaactgcacaaagagcccctgggggaggcagggccccagagtcagtgtccctggcccaccctaggcacagatccctcttccaacctgttgttttcctcctgatactccaggaacctacagggtgccagggacacagctctgcatggcaggcaccaaggttaccccatttaccggggaggaaacactctaggcctcatagttaggaagcaggtgagtcaggatttcaaccctggcctggggctgcactccgaaacactccactgtaccattcacaaaggcatgggcttccctggcgtcggctgtctacaccgtcgcctggaagctagatgccctgggcagcgaagggcaggtggggaagggaggctcctccgagcgacggaagcccacggagaggccagtggagggccctgcgcaacccagcaccagccccgcccgggtctcggggaggagggactgggggcaagagcctggccgctggggttaggaggcccgctctgcaccttccttactgtggacgggccctctgagctctgaggcctggcgggagagcgcgtgcagctcgagctcctcttcccacccagcccccgcgccctacctggtcgaccttccgcagcctcagcccggtcttgccgcgctcgtccttgcacaggtggatctcgcgcaccccgggcttgatctcagctcgccgcacgcccaggctgtacccggttaccggtgccaccatctggccgggcccggggcccgagaccgctgtctgcagacaccagggggcagggggtcagcccggcccgtggggaccctgtgcctcaggagacactggggtgggggtagggatggggaaaggaggatggagccgtccccgggtccccccacgtccccagtccacgcttctcccctaggggcgagaggagacgtggctccacgcggccactagggggcgtcaaagtccatgcccttaaaaagccaggaaaacggggagggaaggggcgaggatacaggaagaggcccttcatttcccaagggaaactggcatcaggaaaagcctcctttaaaacccacttaaaatagaaaaagtcacagtaaatagtgagcaacaggggataaaaggactggatttttgtcttgagaaaaatgtaaaaatatacaaattcatgatgcagaaaaaggcaaggaacttcactctcccaacactattaaagatggtactggaagacctagccagcacagtaggcaagaaaagagggggagtcacacagatcagaagagaagaaataaaacggttcctatttatagatggcacgatggtctactagaaaatcccaaagaatctacaaataaactcctagaccaaataaaagagtttagcaaggtcctgggatacaaaattaacacacaagattcaattgtacttctgtatactaacaacgaacacatgtaaactgaaatttaaaatacaacaccaggctgggcgtggtggctcatgcctgtagtcccagcactttgggaggccgaggaagatggatcacttgagcccaggagttcaagactagcctgggcaactgttgaaacctcctctctactaaaaatacaaaaattggctgggctggtggcaagcacctgtagtccctgctactcaggtggctgaggcaggagaattacatgaacccaggaggtggaggttgcagtgagccaagactgagccactgctcagtccagcctaggtgacagagcaagactccacctcaaaaaaaaaaaaaaaaaaaaaaaggaaaggaaaggaaaggaaaagaaaagaaaggaaaagaaaagaaaaggaatacaatacaataccacttacaatcactcaaaaaaaaaaaaaaaaaaagaggccgagctcagtggctcactcctgtaatcccagcattttgggagaccaaggccggaggaccacttgaggccaggagttcaagaccagcctgggcaacaaagcaagacccccatctctgttaaaaacaaaaacgaagcaaaataaaacctaaaaacaagaacaacaaaaagaaatacgtgtaaatctaacaaaacacatacaggaaccgtatgctgaaaacaacaaaatactgataaaagatatcaaagaagacctaaataaatggaagattctctgtattcacgtgttgaaagaattagtaaagctgtcaattgccaccaaattgatatacagatataacaccatttctatcaaaatctctacaagatgttttgcagatccagggaaggttagtctaaactttatatgaaaagacaaaggaatttagaatagctaaaacaattctgacaaaaagaatagcgagaggaatcaccaccaaatttcaagacttattatatatagctacaataatcaagacagtgtggtactggtgaagggatagacaagtatcagtggaacaaagtagaaaatccagaaatagcctcaaatgagtaaagtcaactgctttttgcaagagtgctttcaacaaatggtgttggctgggcgcagtggctcatgcctgtaatctcagcactttgggaggacaacacagggagatcagctgaggtcaggagttcaagaccagcctgggcaacagggtgaaacctcatctctacaaaaatacaaaaattagccaggtgtgctggaacgtgcctgtggtcccagatacgcaggaggctgagatgggaggatcgcttgagcccaggaggcggaggttgcagtgagccaagatcatgtcactgcactccagcctgggtgacagagtgagaccccatctcaaaacaaacaaacaaacaaaacaacaaaaaaagcaaatggtgcaaccatggcaaaaatatgaactttgactgaaacctaactccttacaaaaaaattaacccaaattcaatcataaacgtaaacgcaaaacataaaactataaccattttagaagaatacgaaggagaaaatctttcggacttagggctaggtaaatatttctttacaaagtatgagccacaaaagaaaaaaaaatcaataaactggacctcatcaaaattcagaactgttaagctacagactgagagaaaacataaaccacacatctgacaaaggactttagaatacacaaagaactcccaaaacactacagacaagccccagcctggccaacatagcaagaccttgtctctgcaaaaaataaaaataacaataataaaagaaattagctgggcatggtggtgtgcacctgtggtcccagctactcgggaggctgaggtgggtggatcacctgacccgggaggtggaggctgcagtgacccgtgatcgcaccactgcactgcagcctggacaatagagcaagaccctgtctcaaaaaacaagaagaagaaaacaagccatttagaaaatgagtaaaatatatgaagaaacattttaccggaaagaatatacagatggtaataagcacatggaaagatggtccacatcatcaggtgccagggaaatgcaaattaagaccatgatgagccatcattatacctatcatagtggctaaaatataaaatagtaataataccaaattctggtgaagacatgaagaaactggagcactcatgtattgctcacggcaaaataaaatggtatagccactccaggaactagtttggcagtttctttttgagacagggtctcactctgtcacccaggctggagtgcagtgctgtgatcttggctcactgcagcttccacctcctgggctcaagcaatcctcctgcctcagcctcctgagtagctggggctacaggcacaagccaccatacctggctaatttttgtattttttgtagagataggatttcaccatgctgcccaggctggtctcgaacttctgggctcaagtgatccacctgtctcagcttcccaaagtactgggattacaggcatgcaccaccacacctggtggcagtttctttaaaaaacttaaacatacatttgtcatacagcctagcaattgcactttgggcatttatcctagagaaatgaaaacgtatgtctatacaaaaacctgtataagaataactttgtttgtaaccaccaaaaactgggaacaacttagctattcttcaacaggttaaacaaaccctggtacattcacatcatggaatactactcagcagtaagaaggaatgaactattattgacacacacaacagcctggatggatctagagggtattgtgctgagtgaaaaaagccaacctcaaatggtcacatactgtacgattccacttatgtaacattctgaaatgacaaaattatagagatggaaaacagagggccggatgccaggggttagggagggtggcaagcaggcaggcataactatacagaagcagcctgggagggaggtggttgtggtgatgaactagttctgtatggattgcagtactggttacatgaatctacacactgatgaaatgacatagaactagagacacactgtactcgcgtaagactcctggttttgatagtgtactatagctatggaaaacataagcattgaggaaactgggtgaagggtactaacaacttctctgtactcactttgcatcttcctgggaatctactgtttaacaataaaaagttaaaagacatacaaaattttaaattataaaaatgtattcatcatcttatattttatcaaaattacggttgaatgcatttatgtcttaattataggaacaaagagtgatgacagtggggctgcctacagaaggaccttctttgcttcatgtctgcctttcacagcacgaccatgaagggggccactgtggagaaacaccccagggtgccatcagttcttctcagggtcccacatggcctcatccttgtggatttcctcctgtcagatcctcgttttggcagtggctttgtatgtgtctgtgacagttctctatcatcatatccatgaacttcatgaaattccccagccttagacaactttgcagtttgtactttcagtttcatcggctcaggacgagcctggcaggaagactgacaggtgggacgcagggatgctagagctaactggcaaggggcttaggcggggactggttctacaggtaaatatgttttcagtggcatatatttctgtgatggtgtcttttgctccccgaagccatggaaagcaggaattgagccttgttgtttaatttggggaccagagttgggtgacgagctcctgccctctcggctctgtttatccatgcaggcagccctgcttttgatgtccccaggttcacgctgggcttaatgacctcccttctcatccagctcaggcccaaggtcaaagggcaagccctggttctccatccccaaggcttgtgggaagatctgaaaccatgaaagcccacagtggttttcgtgaagcctcaaaatgaacggtgccatcaagaaacagagccagcagagtgctggggagaggggaggtccgagcacagagagaaagaaggtctgttgaaatggcaagaccaggaaaaagggaggattgggaggttctgcgcccgcagcaggcagaagccaaatacatacactgtcaccctctggaatctgaagcaggctctcctggacttcttggctggagagggaaagacccatataattttccagttctgccaagtttgggtacaaaactgatagggaaagaaggaagaataaatgtgtcattagaggacatgtgcttccctatgcctgcctggctcccctgtggctgctcatttttattaagaaatggagcctgggaatggtatttatttccaagactgtggggtatccccaggaacactcactgatgagcgctcctcagagggcccaggtgcagggtaggacaccgagtcctcatgcaccactttgctattcaactccactgactttatttgacacccagaaacctctgcatccctcagcgaatggttcccaccaggactggcagggtcctaatcccttcttataaggatttgtgtccttataagaagagacaacagagggctcatgcatgcgctctcatgctgtatctctctcgtgttctcgttttctctctctcttttaagcaagtacactgaggaaaggccatgtaaggactcagccagagggtggccatctgcaagccaggaagggaggcctcaccagaaactgaattggccagaaccttgatcttgggcttccagcctccagagctgtgggaatatacatttctgctgttgaagtcatccagcctatggtattttgttatggaagcctaagctgaataaggcaagtggggttctggccccttctctctttgagccgctatctgccgtccacttcttccccacctgcccccaccccaggccagccatagttccagcaaggaagtctgacaagtgtggtatttcattcccggggtcacatgagattggatcaccagaatggtgctgaaatgctgatttgaggtgactcaaatcgtttatatagacagaggccccacaaatgatatcacatcctcaaggcagccttgctgggggcatcagagaagccatagcttccctaacttgagctgggtttggaaggataaacaggggttcaccaggcagtcaaggagggaggggaacagcatgggcacaggctctgggaggtgaggtgactcagcccaggtcacccaggcagtaagaggtgggtggcaactggaagcctggtcctctcttcccaccatgttgagtccttaaccctggagcctcccatacctttggcattgccaagcttccctgatgatctcttccctgaaaggacttggcacccaggagcccctcatcccagcccactcacctggtggtggggaaatggctgttgcctggactggcagggctggcatcttgggtgaggctctgacctgggcctggggaggagcagggagcactggtcagctgtggccaggaccccaggaaccccagagcctggagctccatgaggccagggtctgggcattaggggtgtgagtgggcccggggtgtggggggagtgtgcaccaaccctcagggctcaagatcacgtaaacgtggcctccgcagatgtgtcttttcctgggaggaagttctgggggactgtgacccaccctatgtcacaacccatttactgcctgcaacaggcagaacatcaaggcccatctcccaatcaagttctcagctgaaaagtctccatttctcaaaacccactggaaccacagagtgctgggatggaggaggaagggggcttctgggggctaagcagaccaatgcctatgcccactagtcttgtttcctctgaaagcctgccttagagcatggagcccgcccatcctggagggagggagagctgggcctgggcaggacagagcaggcatgagagaggcatgcgtgcgctgcttggtcttttctattcttgctgtaacgccattggcattgccccctggatgtcttctctgcccagcaggccctgcagtggacacctacatgccctgaggcctacgggaatctccaagtggccccagtacccagcaccttccagggtaatccccaaggtccccttcagggaatccaggccaatggggcctggcgacttacctgaatggcttggtccacttttaggtcctctagagatgggtacagggatgacatggctgattctcagaacaccctgcagagtgcagagggtggggaaggataaggatgcagctgatgcccccttgaaaggaggcacagacatccgcaacagcaagcgggttggaacttaatattcaaacagaaaggcagcagggcacttagaatgcctccccgaactccacccctaatcccctgtcgatatttgaactctactgtattccactcatctccagcctcactgtcaacttttaatcttggccacaatgaagtaagaccagtaggaaatttataaagactctcacacaaactgtagcagaacttagacactcaacagggcactgctccagagggaggagggaatggggggtggagaggcaccatgagcacttatttactaaacaccttctcattgtcccagggagaatcagcaggacctctgagcaaggtgccccgagaaagtgaaaggaatgatgacctcttaagaaatgttttattcccttcctgacgaaatgtggggaaggagcagtctgcctttctgggttccttccctttactcactaaccactggctctgtcacacctccaggcttcgctgaggcagtccactccaactggagcccctgcccaacctccttgtcaccctcggttcctgtgggacacgcctcccctggctcccaggcaatacggtcactgcccctcccacccaggaccctgccctccgggacagctccgggacagcaccgggccagcctcttgcttgaactcgccacttgtcctgactgcagttctgaggggtaaaggtgtgtcctattcaccccactgaactcacatgtgatgggtacacatgataaaggaatgcccgctggtggcacaggaaactgagggtcctgtgcctgagcgatgtgactccaggcttcccaggatcagatccgctgggcacctccctgagtgaccacaggcacgccgaggacatactcatccatcactgctccttctcctccctctgcacctgctgccttgacccctgtgtcatccttggccccgcccccactatcccttcttgtctgtcatcaaatcccatctctcccacatcccgtgttgtgcaggtccccatcatctccctggccctctccaggtgccataacaccctccaaacacactgctgcctcccctcctgccgtcctgctgctctccagacagcagccaccaggccctttgtgtacacacttgggatgtcatgccctggctgaaagcccgccagtggcttccctgccttgggaatgtactctccttaaagaggctcacagggccttcacgattccaccagagattggaactggtgggcccagggccagatggaaatagattttatttgaccttgtggagtactgtaaacgttcagattagcagcttaaacacaaagctcaaggtactggatttaataatcgaatttcccactgctcccaaaaaacaggaagctttggcaaccctaggctatagcagagtagctacaattgagtagcagcagactccagggtgacccagtccaccatcctctattggctgttacacccagaccattgtactcactggtgccaagtcccaatagatatttgtttgcaaccctagtctacctctccagcttcatttcttgccttacgtcctttcagctgctactttcaactccagccacaatgagctacttccacgtccttgcatgtgattccctcctgtctcttttgcatgtgttattccttctatctggaatacccctcctctccctgctccttgcttggccaactcctaataattttcaagtctcagatcagggagctcctcttacaggaagcctgctttgatttgtgctccccctagcccctgctccatgtcctactcctgttgagtattcaccactcttgtggttgcctctttacttgtctgtctacctccttaggagttccaagatggcaggaacaggggcttctcatttgctgtgaagcctctaacccctagcatggaggctagctcaataatattgccagaagcaacacattctacctgggcttccacttttctccttgtaaagtaaagctctagtatcctaagaacacccaccttcctggatgaaacaaggaccagaagtcccaaatgtgcctctcacagtcctgttttattattattattattttgagacagagtctcactctgttgccaaagctggagtacagtggcgcgatcttggctcactgcaatctccaactcctgggctgaagccatcctcccacctcagcttcccaagtagctgggacataggtgcatgccgccacacctggttaatttttgtattttttgtagagacagggtttcagcatgttgcccaggctggtcttgaactcctgggctcaagcaatttgcccgcttcggtcccccaaagtgttgggattacaggcctgagccactatgcccagccttttgtttttaaaatctgaattagtgccaatatttaaaaatctggaaacacaaaatgcgtcacttcttacttggattgaaaaaaatataaacatttggcaaggcaagagctggaatagtgcatggcaacactcacccggctgagtcacagcctacctcgcaaatggggctgtacgtgctttcctgtttccgcaagtacccatcagcccttcactgatttacgttgcctgcttggttcctggaggcagccagttccagaccctgccctagcctggcctttggggtagaaatgaccatcccaacaggacaggaatttcctgggaggggagggagtctggctctgacttcctttagaccacctgggggaagagacccctttgcttatagccttccccactgtgtacacacactatgagatttttaatcttgggacagtcctgagcagctatcatctgccaaaacatgacctgccaccaggaccacgcatgaacagcagatgcgaaaataagcagccactcctgccctgattttcctaacatttaaccagtagagcacttatatttttgtcagctgtcccctgggagagcagggagtcagagatccatttcctggaaatcactcccgggccagatcacataaccctttttctgtgtctgagatcctttcaccactgccaccttctctggatcccatcttagtgctgggatgcggggaagtgagaaaacaggtacagtcgttccttggggtaggttccaggacaatgcccctcactccccatccctcggataccaacatccacagctgcttatgtcccttacataaagtggcataatatttgcatataacttatgcacattcttctgtatactttaaatcatctctagattacttacaatacctaatgcaatgtaaatgctaaacaaagttatattttatttttatttgaatttttgttgttttttttaatttttatttttaaatattttctgtctacagttggttggatccatggatgtgaaacctggggataggaaaggcatactgtatcccctgccttgtagcagctcacaatataatggggaatggttccctgccagcgaacatgctgtgtttcgttcaatcattcaaaacatttgagtgtccactgtgtgccagacgtgctggtccctctgctgtgcacatcatcctccttggtgtgatgctccttcgaggctcagttcagatgctacttctctgcttggcttttccagactgcatgatacccaggctgcctggctgggtcttcccatgtattccacccctgacctgtactgcccctgttgccaagctatttatcaaattatgtgattaatatctgggtattttcttacactggacctcactcataagggcaggagctctgtcccgttcacacacgatccttccccgccacggcactgcccagcacacatatgctagcaaaaattatttgactgaataaatcagtggttttccaaggaacagattggaaatttatgtgggcatttttgggtgtcacgagactgaggggacagtcatatccctgtcgggggtggggggggcagggatatgaaactcctgtaatggatgggacagtccattacagtcaccataacaaatggtcctgtcccgcacaactttcagatatcctgccaaactttcaagtaagccaaaaatccgttataattggttgtacatacaatcacaatgaatttttccctagttttagtacacactagactgtctggaaatgcatatatcaggttggttgtggggagttacactttgctcaccattctggaaaatcgctgcccaccctgctccccacgggtgagtcacccgaacagcatgctcacgtctgtgtacatgtgtagctgtcacagtgactccgcgcttttatataaatatatttagcctttgactcaagatgtcagatataaactgttggcaaaattcagctgaatattgtcttctagtaaacctaagctgattcctaagttgggtacaagcgtgatcgggtgtaagccagcctcagcttttacaaagtgaaatgcatattcttttattagaaattactttcatgtccctgccttctccttataaacaaagggcatcatattgattttttacccggggaaccatcacctgggctgcagcctcaggacgaacctgtgccttccctctgtctcaatttcctgctttgggaaataggagccacaagccacaaactccatccaccgcgccacaggagcgaggtccaacgcaacggtccctagggcctgcctccaacccagcctcagtttcctatctgtcacatcgttctatgatctcgaaatgactataacccctttcttagccccaaaccagccggaagcgacatcttccggttgctacaggttacggcggttgctatgggctacggcgcctgcgcagaaacaccgccaagcgactcagcaacttctagagcgcatgcgtttcgcccacccaggcccgggcgcggttaggggtgactcccacgatccctagcggctgcagagtggaacatggcggcctccttgccgcttgcgttaccagagtccacccggcctcgtgctttctccgggcgcccgtagctggcgccggcatccacaaaaatagatcaggtaaagcagcagagtaaggcataggaagacttggtcgggctccgcggcccctctttaccggattggaggctgcgcgggtgaaatcgagctttaaactcccctggcctcggaacaccatttgtagcctctgaaggaggaggacttataagattctgtactaaggcagccgtgggaagggaggagaaccaggtcggcccgcgcgctcccggctgcttttgctctccctttggtttcgaaagcgtcaagtcccaaggtatttcctaccaattgtgacgtcacccttcctcccccgtttctcacccgtttcttgtctggccgtgacttctgacccagtgttgagctaaaaatgccccgccccaccctacgcagattcaccccgcgtcccacccaccagtgactgagtgactgggcttctgctgcctagggaagggttcttggcttggccgggcaaatcaattcccacagcaaaatcagaccgaaagcctgttatgagggactcaggcagttggatgtggcgtataggaggaaggctagggcaatcaggaaggtctcctggaggaaggaagaagaccctgactgggccgtgtaggatggatgttcaagtgggaagagagtgtgctattccagggacagggaggcccaggcctgagagtccagttgccttctggatcccgtttacctcgcagattatccaaactggactcgtgattttccccagctgtgccgcgcctccccagcggtctcactgaatccacccatgggctatgtcagaaatctgggagttatcctcagctcctccctttcccttctgaagccatacctacttcttgccctcaaatctctgtgacctgacttctggtaatgtttccattctcaccatctcattcttctccacacttatcatgaagttcatttattccagactactttaggttgagtcctaaaagtcagcctgctagttcatgcctccatgcttttgcaggtgctattccctctgtcttaagagtcattcatgccttctctcttttccttgttgtgaactctttttcctccaatttaaagctttcccccacctgtacgcatggagattggcaagcctcccttctctagacgacagcatttcttgtatttgcctcttcatcatatattccacaagtgtttgttaatcacctactatgagcaaggccttctgcatttcctaggttggatttccactgtgctgtgtttgtttgctcatctccctcactggtcaggaaatgtcactcatttgttaacccccagtgctgagcacagtgcctggcacacaacaggcatcccattactatttctgaaaggagtggaaaagcaggcacagagagaagagaaagcctgatatcctaaatatacagtctttcttcccatgcctgtctgtgtttgcagtcaataagtagaaagtctttcgaagaataacctgggcctggaaaaggagagaaaccatggccctaacgagttaggttgaaaggctgcctggctcctataatctgacagtggaagtttgctcagttctgtgctgatggcttcccacaagtaattggttcctccgaaaggaaaagaacccacctaacccctctctctcagaggaattttcctctcccacagccctttccagatttccatccctgagcttctgtactttttgatataagcaataacaacacccacaacaaaccaatagctgggcttcggagatcagcagggctgacaaggggacttcagcccccatctttgaacttagagtgagaacactctttggaacactttgttccaaagagctgaagtgatggaactcccactcgttcctgtggacagctcatccgtcctttacaagacagtgcgcgggagggaagcgtgggttagagtgtcagaggaatagctcctggaaggccaaattagcccagggatgtggtgagtcggaatagaagaagctgttgctaggccaccagcatgtacccccactcctcctctcagtgctgcactgcctgctggggaaaagctgtgacttcctcaagcagacacgcctgaacccaggcccaggcagggcagggttcagactgactgcttctgacttgtgagagcacagcataggcaaatcccctttgaatgtcatttcttcctttgtaatctggataacaatagttgcatcacagttgtctggagactgaaagatttttaaaaagagttaaggtgtatatggaaagcatttagcacagcacctagcacataataggcattcagtaaaagttagctgtttattcattgtttcagcgcttacttactcagcacctgctaagtctgagtactgttctaggtatcagcagtgaaggaaagaagacttggtccccaaatgtactttctttgggggaagagctggataaataggctttgtgactctgtgtgctgtgttagatggtgggaggcactggagagaaagagcaggacggagggtcatgtcaggaggttcagaagccttgctggctgggtggggtgacatttgaggaaaggcctaatggggtgggcacggccattgcagagcctctcaggtgggagttggtgttgtgtttagaggacatctgccagtgagaagccagttgtgcagagagggagtaaggaggagtagtggggaggaagctggagaagtgagaggggccagatcctggagggcctggaggtcatggtgaggactttggcatttactgtagtgagatgggagccactgggggatttgtagcagcagagtgccaaggtccaagggttattttgacaggcctcctctggctgatgtttggaggatgggctacagggcaggagtgggagcaggagcccaggtgggaagtgatggtggtggaattgtcatgagcttgggccactgtacgtgaagctgcctgtccagtgctcgcccagcccataccaggctcgttttctgccccattttctgagaccctgctgaggagggcatgcactggctcctgtgtccagtatgtccttccattctcctgactttgtgggctattttcagtctccagatgaagaaaccagttcttagaaaggtgaagcccctggcgcagttccccagcaggtgtttcagtgctgtggcaggaaggttttttgatagaaacagcctcaggccagagaagtcggcctgagctgtggattccttgggagaaatgggctttttgcctgcctgcagcctctggtttcggctggaattggcctttcaaggagcaaagtgtggatctcatctccttgagcacagtcatgggcagtcagaaggcatcgggggccctcatgatgtctgggtgaagaaaatcactcagcccttaatcaaacttggtccagggctgggatcagaagaagaaaccccacttcacacttgactgcttggagtgaagcacttcgaaaggaagctgcctgggaagtcccagaagggaaggggcagggagggaaggggacagggtgagagcaggtctcactcatcccaatcccagccaggattgggtcagggcccccagcgcttacctgcaggcaaggtgctgctccacgaccttctccagctgctgccgctgctgaatctgtttccctccctgaaacgtagccctgtctctcagctggcttcctgatctgggaagggtggtgcctgtcccctgttcagctgactcaccttggactgggatgggcacaggtgagggctgtggctgggtaaacaaggcaggttgccagcccagaggaggcctttggccttagtctggatttggaggtgggattaaggccctcacagctgctgttcagacggttatgaaccaagacttcttggccttttcttaaatagctctaaatttgggttggacacctagtcctgctgatcgaggcagttggctagagggcggtttgtgataggtatctaggggtctaggccaggatattaaaaagtggtcatatcctgtgacccagcatttcttctaggaatttgttacagtggagtcacagggcccatccatcactgctgcttctagtaaggaaaatgtagaaatcccaaatgcccatctctgtggtctgcttgaataaatcattgtctgtggaagatcacagagctattaaagtcacttaaggaagaaggtatgaggaaacatttctgagattctagtgagatgttgaaaaatcaatattgtgaatctcttcttgcattttgttttcattttttgtaaagtggatgtgcgttgaaagcagtctaggaggacatacgctaaaatgctgagtatctctgaatggcagcattgagggtgaggttttcagtttgtacttttgtgtgttccaaggtggtttttttttttttaagttagcttttgctctgaatgctcatgacttttgtaagggggaagcaattaagtttgattattttaatgggaatttagagtggttgtctcttgggagcagacctaaggagctgtgtgctgaggtggagatttttttttttatggcacatttttggtgtcttaaattttgaaaagtttaaatgtactacttattccaaaaataattatataaatttgaacagaaaaggaggaagaatttagtttagatcctggtgggtttggttgggtgagggtgcctgtcgcactgggtgcctggggagggacgagggactcgtgtgctgggcagtcccatgaggattgacgctgtacacactcagggtgtgtcagtatctgggctgcttcctgggccaggcaggcctacgtcacagttcccatgacccacctggcagagttgcactagccttgggtgtcagatcttgtgcctgccaatgaagagcttacagcccagagtcccacacaggaaacacacaataggaataataacaagaaagacatttgccactaattcagcacttactcccagagagcacagagattctacccctggcactttaaaggcattatctcaatggcttctcatgccatccctgcagagtaggtgtgactcacaccattcctccaggtggggacactgaggcacagaggcaaagtttctctctcaagttagctggaaagtgggccaagttcatgtcttctcttctatgggacatactgtttcagaaagctgaggtgtggggcaacctcagagtaagctgtgtgggcctgaagctgaggtaacgtgggtgatggacccaccttaggtcaggtgtccaaggccaaagcaaagtggaaaatagagatcctaactaaaccaagccactcctcccccacctcacttcattcagtcatgacctgaaagggcctttatagaagagggaggaggaagcaggcccttccaggtaaggggcttgcctgtggtcccagcatgtcagcatggagcccaggtcccctaactcccacctatttaatacctacagggactctctttctattccctctttggatagttgccacccatcactgacttccagccacctggaaatatctttcattgggcatgcccttgctcgaactcttcagtggctccctcctgcttcagggtctgggctaaactcccagggctgacatggagacctccacagcccactccctttattacctcctcagcactcccccagcacctctgcctcagctggactgggagccccaccattcctgccccactgcacacccacttcctacctgccctgactccatacctttgcctgtcctgctgctgcccctggaacaccttctcctgcccccacccacctagccacatccaccactgagctcctccaggaagcctctgggatcccccacatccatgtggcctctcccgcctctgactctggatcagacgctcctgttccattctttaataatcatcatcttgtactcatgtgtaccttttaggctactagttagaccctaagttccctgagggcagggccaagttattagctctacagtggtcattcttttgagacagcatttcgctctgtcacccaggccatagtgctgtggtgcaatcatggttcactgcagcctccacctcccaggctcaaaggattcttccacctcagcctccctattagctgggacgacaggttcacactgccacacctggctaatttttttattttctgtagagacagggttttgccatgttgcccagactggtctcaaactcctgggctcaagcagtctgcctgcctgagcctcccaaagtgctgggattacaggtgtgagaccccacacccagccagttactcttttcaaaataaggagtggaactgtgctctgaccagacaatatttctgctttgttatatatttgtatgaacaagtctaaaactttgggtggccagtaaacagcacacactcagaaactccctggtagcacccatggcaccctgagtaatcaaccactaatgtccttcctgctgggcccagaggcctctccggatcctctcgtcataatgctgcaggcagctaccgtcacctagagttggctcatgaggtgaagtctccatgccatctggaatgggtgctccatgatggcaggggcttgtcttaaccctgaggcctagtactatgcctggcacatagcaggctcacagtaaattttttttttttttttgagatatggtcttgctctgtctgccaggctcaagtgatcctcctgtctcagcctcctacgatcctcctgcctcagcctcccaagatcctcctgcctcagcctcccacaatcctcctgcctcagcctcctgaatagctgggaccacaggcgtatgccaccacagctggttaatttttgtattttctgtagagatggggttttgccatgttgcctaggctggttttgaactcctgggctcaagggatgtatccaccttggcctcccaaagtactgagattacaggcgtgagccaccacacctggcctcagtaaatattgactgagtgaataaatgcccctcctagaaaagtcaatcacagttagaaacttaaatggctgacccttatttaaaagatgggttgggctggggcatccgatctgagtcccagctctgtgatgttgcacatgttactaaacctctctgagctgtagtttccacacctaccttctttatagacttatcctgaagactaaatgaggtaaccatgtgaagtacctaggacacagctggcatttagtaaatgttagtttcctactttctcatggctacatgtcacagaaacagtcatctgattggagtgaaaatagagatgctcttcccagaagaagagagaatgtcggctgggcagagaaggagctgctctacactccagccctctgcatggaatctgggtagtgcagcaagaccctggcttatgtcatcacagctttgttcctactgctgaattgaaataataacaggaagcgtagcatttattgagctcctgcacactgggtgctctgctgggcactgggcatacactgatctcatctgttcaccataattcccagcttcagagtgaagcactttgcccaaggcaacacaccccaagagtggtaaggccaggccttggctctgaacctctaggagtctcctaccctagtgcagctgagtcacagatttctctttaagaaacccacaaagaagtccttaggtggcaaaaatttgatcacatggccacatagagctgcatgggagactgggaaatggaggcagtctattgttagcaggttctgtgccagcctctactatagcatgctgtgaagccctgccctttctggacctcagtctccgtatttggccagggaagagtttggatggattttctctgaggtttgccctaacggtactaaggccccacaaagggccaactctattgccacttccagtccctcctgtggcgtgaacaccaaagatgtccactatgagcatttggtctccaaacacaatgtccttcatgctatttctgagctccatcttggttttgctttttggagatgtgtgtgagttaaggtaggccaggttatgctgcagcaacaaacaaccctgaaatcttggtggctcctaataggaagtgtcattctcatgcacgctactacccgtcaagggctggcagggtccccatgtctccttactccaggactgggggtgatggagcagctgccatctcaaaggccgtcagaagccacggcagagggaaagagatctctatctggcaattaagtgctccagcccaaatgacagatgtcacttctcacaccttgttggccaggttaccccacctcccaatcacaagggaacagggagctgccatcccaccacatgcctggaaggcaaagagtaggaaatataggaggatgacattaataacaacctcaggcctctgttccagagtgtctgccagccagctctgatcatctgtgtcagggcaggggtagcagatgtggcctgggaggctgcaccgagccctgctgggacctacatggggagtgaggggctgaagagatggaaagacgtctgacattctggagtctggggccgaggctggacagcgcaacctgccactgtaggtagaattcctatgttgaaactgaatctccaatgtgatagtactaagaggtggggacttttggaaggtgattacgtcattagggcagagattaggactcttatacaagaggtctgagggaacttgtttgcccctttacgtgacgatgcagtaagaaaatgtaatctttgaagcagagagcaccttgatcttggacttcccagcctccagaattataagcagtaaattcctgttaaaaaattacccagtttaaggtatgctgttacaacaccctgaatggactaagacacagtcccaggcaggagcgttagtttccacttctgcaaaattggggcagtattccctaacctgcagaattttgatgaagatgaaatggatgagtaacagtggggaaacttctgtctactcccagcagccttctacggaaggtggacttttcagcagaagactctgcccagctgagccctatgctggatttgggtggtcaaatttgagagcaggagcttggcaaagaggggctttggggaggcagtcagtttggcgggggcatattgtaagactgtgtgcttacaaaagcacaatatattcctaagatttctttggggtgactttatttgggacagttttgggggagttgacggaggtgggggcactctggcccctgatgccttcccccattcaaacagacttgggggttcctgtggcaatgcacaagatgggggtgcaaaaagggggcaagagaaggaaggtagcatgatggacagaggctggaccagtatagtgacccccagggaaggtcccctgggagggtgcaggcaagtaggagggtactctgagaatagagtcaggttctgaagctgttgccttcctatgatgcaagcctcagctcctcctccatcctcaaatcttcagtaaacgccctctgttgacaggacattcactactgcacagtgggcactcagctgctgctttgtgtcatctcgtgtcatgacatgtcatgtcaaagccaacctgtggacacacaggtcctctcggcttccctcaggtgggggtggggagaaagcaggtcaaaagcccagccttggtgggaatgtaaaccagtacaactgctacggaaaacagtatggagattccttaaagaactgaaagtagaactaccattcgatccagcaatcctattactgggtatctccccaaaggaaaagaagtcattgtatgaaaaagatacatgcacacacatgtttatagcagcacagttggcaattgcaaaaatatggaaacaatgtaaatgcccattaaccaatgggtggatacagaaaatgtggtatatatacacaatagaatactactcagccataaaacgggacaaaataatggcctttgcagcaacttggatggggctggaggccattattctgagtgaggtaactcaggaatggaaaaccaaatatcatatattctcttggggtttttttttgttcttttgtttttgttttttgagacggagtctcgctctgtcgcccaggctggagtgcagtggcatgcgaactcggctcactgcaacctctgcctaccaggttcaagcaattctcctgccttagcctcccaagtagctgggactacaggtgcgcacaccaccatgcctggctaatttttgtatttttagtagagacggggtttcaccatgctggcccggctggtcttgaactcctgactttgtgatgttctctcttttaagtgggagctaagctatgaggatgcaaaggtgaagaagaataatataatggactttggggactcacaggggagggtgggagaggttgagggattagaggctacatactgggtacagtgtacactgctcagttgacaggtgtaccaaaatctcagaactcaccactaaagaacttacccgtgtaaccaaaaaccacctgtaccccaaaacctattgaaataaaaaagcctagccttggtcctgcccagcgcagagagacatgaagctatgacttggatttactcttccaaaagcctccaatagccagccctgatctgctgacacagttccccttctgagcagagaaatggaggagaaggcagcagaaagatgagaaagaatctcccatgagatcaggggctagctcattaatctaggtgagtatgccattttggagatagacaaactgagccctggagaggtcaaatgactcagtaatgcagccagactatggcacaggcagggtgatgagccacatctgccttcctgtagccaccagacaagggaagcaggggcacagaacagtcacatagcaattcagtagcagagccaggatccagtgaccccaaaccctggtctctcccgactgctagcctgggaatgttgcccagctctttcacccacttttggccttgcctcttcaccgcacctgaggatccagggaccccaagccctggtttcctggctgccagcctgggaacattgcccagctctttcacccacttttggcattggctcctcaccacacctgtgccagtggctggctgggttactcggagtcgtttgactcctccagggctcagtttgtctaatctccaaaatggcatgttcacctagattgaatagctagcttctaatctcagggaagtgtctatcttgtctttctggggagattctgggtgtcagatagggagaggcagcatgacctgagaaatctaagccccagacactagaggcggaactggtcccccctgcatcctggccggaagcagcatttgaagctgatcttgagcgagacagtatgaggacagccattgccattgttgcacacatgatcttactcaaccctcaggtggccctgtcgagtgggttccttcgttttctagtttttccattgagaaaacacaagtaggattcagtctgaagactggtagttcagtgctcccaacaaggggcaggaggggcctggctgagcaccctgagggtggagtcggggcaggtgccagaacacggatgctttcccgtctggctggagctgctcccgctgtgttccggagcagggcagaacaggaaggcaggaacaatgggcagccggcagtggcggggtgctggggttcctgagccaggggtggggaggctcaggcctggtcaccaccaaggctgggggtgcaagtttcctgtgcaagagactaacaagattagccactaacatttttgagcacttactgtatgtccggacccgtgttagacactttagatggattagcctcattttacagataaacaaattggggcacagagagtttaaatgaaatgctcaaggtaagtaagaggtgaaagatttgaacccaggcagactggcttcagatcctatgctcttaactactataactttatatgtgtatacatacatatatgattatatgcatgttatacatactttctcataattttcccctttcacttaatttaccattgccagttttctgtgtcatcaatatcatccttgtttacagtgctaacgtgccgggaagaccttgtccatgtgtcctggccacatcccagtctgttcttcccatgacctgaggggtctggatttccactgttggtgctgtcattgagttaaggtgcggtgcctctcgtttaaactgctgataacagtggtggcaccaaggtgtgggctggggggtgcttaagccccttttaatctctatcataataactcccttatccaaataaacaccatcgacataaaataatgtgcttttatgcaaacagtacttcaagacaggcctccctccccagctcaatcattgctgcacctaagcattcccacagagaagtcccccaggtagcctggctggtgggttaatgtcagagtggtgctggctctgaacgcagctgtgggagcactgctggtatcttaggatccggtggggtggagatttggagcccaggaagacccagcctgacctggtggtggtggcttcagaaagagctggagagggtagaggcccttgcctagggctcttactgcattgtatgtaagatgaaggccacagattggtgctgtcaagactgggaaggcctgtgggactcaggaccccagggtaagactgacctgcccctcctttcacctgagacagactgggagatcccagggcactgggggcaggggagcggaaggggcttgttgaaaatatccaccatggcagctaggagagcctgctggagccgctcctccgggggtgatgaacaagctggaggacccctcctggaaccccctttttgccctcacaaggccagctgggagcactggatagggaacgagacacctgagttttgtgttctagtttcatcgctgcctgtgggtggctatgtggccctgggcaagtcactctcccttggtagcctctggcttcccacccctaccataccagggaacaccatggactctcccgttctgccagatggtctaacaaagatgctttccctcttgggtcacctgggctggcaggtgggtgattcagaagtcacctttctgaacctccaactattattacatattaatatacatttacataattaccttccaggtatggcctttgggggtcacctgttatccacttccccttatggtagctgtcctctattttcatctggggaagcctcctctcctccacctcagccatgtgcagtggatggagttgactcttcttctggctccaaaaggggaagagaggcttgcggatctgtgcattccatttcccaaacctcagaggaatgggggttgggtggggcatgtgacccaattccagcccatggcatcaggcttagaactggtcctgattatggagaagtctggaagcgtcaaacctgaggggatttgaggttggagttaactggcagccatcctgcccccatggagaatggagccattgcagaaaaggcggagctggggatggagagagagacccagggcctcctgatgcagcttaacccctcaagtccagctgtgcgtgaagccaactgctcacccttaggcttttcaggtacaagacaatcaaatgcctttttcactgaagccagtttgaagtgggttttctgttgcttacagctagaaaaagcctgacttttgttgatgttacttaattctatgctgccatcaaaggtacgatgattttttaaaggaaaatattaaatctgcttaataacaggttatttttatttttatttttttgagaaggtctggctctgtcgcccaagctggagtgcagtgccgcaatctcggcttactgcaacctccgcttcctgggcttaaggcatcatcccgcctcatcctcccagcctcccaagtagctgggactacagatacatgccaccacaccctgataatttttgtatttttagtagagatgatgtttctccatgttgctcaggctggtcttgaactcaagcaatccacccacctcggcctcccaaagtgctgggatgacaggcctgagccactgcacctgacctaataacagtgttgttttttttttaattaaaaagatgcaaatcaggtttcccttgtaaaaaaaactgacactagtgtatttttacttataaaattgcataccaccatctcctttggtgatatgatcaaagttcttcacatctagagtctagactgtgagaaacaaactcacccgtccaaacccaaagaatggactcagagacacggagaatagcggaagtgagacttttaatacagtcttgcaagatcaggtgtctggtgggcaggcataccccgcacagttacaacaagcaatttatcctctagtgtgcaggtccctctcctggttcctcataggctgagtattatggagaccagcgttggccaggctggtctcaaactcctgacaagtgatccacccgcttcggcctccgaaagtgctgggattacaggcatgagccaccgcgcctggccaggtaggggttttgggtgttttctttagggttgtctcggtgcattttgttgcagcccataatgcattgcaattatagtctgctcaagggctttttaagtatttgacctatgacctaggtagtcaggcaagctgataaaagaatagataaagtgagctattttgcaggctagtaaattttcattctagactaaactcttaggttcggatgagagcaactaagggcaccccaacaagcaggctccagctattgaagcaagggcctaggatattctgtccttctgtagctggcagacccaggcctacttgaggcacttcatcttggaaatggaccaccatttacatatttcctacatagactttggaggtgtttagcaatttttactttcctttttcttttctctcttcttttttttttttgacagagtttcattctgttgcccaagctggattgcggtggcatgatcatagctcactgcagcctctaactcctgggctcaagtgatcttcccatctcagtctcctgagtagctgggactacaggcatgcatcaccacatccagctaattattttctgtagagatggggttttgccatgttgcccaggctggtctcaaactcctggactcaagtgatcatcccacctcagccttccaaggtgctgggatgacaggcctgagccaccatgcccagccttctctttcaatcgcattgtctggctagcagtaaatcagtcttctgtatactcaatataatctgttatttccatgtggcatcattttaaaagtcattttaagtgatagggaatcgggtaaaattccactggactttatcacagccacccaaacaaatggatagcagatagtgacaacacctaactccccctctgcctgctggctggcagatttcttggacatccattctcgggcacaccctcattcaagaaactttaagatggtgctgatggggaggtagtgtgtgagaatgagttacgatcatcgttaccatttctttgaagcattccaaattgctagcaaacttgaaacaaatgcccctggctgagtctgggtgtgttgggggccaagtatataattggaagttctctggattaatgtctatatacaatgcttattacaggtggtttttaaatgtgctaatatcatattaaaacttaaccataaccacaatgattgtttagaactgaagactaacagaaggttttttggactaatttaatcactgactttgaaattgccagtgcagtgatactaaaaagcagacctacttttggtggttttcttgtcaccttcaactgttctgcagactacgtccccctcattgcctgtacgaggtgggtctcccactgccctattgtgctcagtaaatgttttgatgatcataaggagaggtccttaatgggcatcccagaaaggagtgaacgagggagtgacccgggacagggagccattgcttctgagtcttaagcctgattatgctatgtgtccttagggaagccataccctctctgtgcttcagatgggtatcctttccctgctctgcttagcctggatgatggagatgtcaggccttgggcagaagtgaatgacaaatgcttgcctgctccaaccctgggcacccacctaggagtcaaacacatgccggtgctgggccaggtcagcctcatctgcccatccccttctcctcttgctccccagctatccttacacctagctaggccttttaatgcttagtaggggcccctcacgtgaaggggctgatctctgatgctctcaaggacccctgttcctggagttgccccatggctgccactgggcgcctcttcccagcctgtgcaaaaaccccttcccagtgtctcactgctgcactggcttcacagccccgggctgtggtcccaaaggacatcttccagtcctgtcactcagccatccccagtgagttatgctacagctgagcttggctaaaaggcagcctcattcctgcctggaacttctgctcctttcccacttttaatctgatggctgagtctgactcactgcagggctgtgaggacaacagatggcccagaagagaacaaatgcacacacacacacacacacacacacgcatgatatatacaccccatgtttcacattactttagctaagggtagtgagatggccacagagcaagagcagatgcagccagtcatggcctggcttttgaccttccccagttccctgtgcagtggttgctactttctctgagtaggtaggatccttccagaacagagtaaaaggctgagttcctgctatgccacaaagtcttttatattcagtttccatcacttccagaagaacgtacataaccatgaaggcctgcccttgtaatgttcaccaaggtcgaatttccctagttcctaaagcttcaatattaccattccagtcttcccgtgacccagataactctttcaagctcatctcgccagtgtcctgagtccattatttccattgagggaccacctcatatccatcaaacatgacaggagaggtctgaatgccattggttggcagagattgtttcttccctggttctcccctgtgaagactgagaagtggtcagtctgccaacattgagagacagctcgggaggttttgtctgcctggtgtatacagaggaggctgtgatgggtcacatctaatgtctttccagagcagagaggagcccatgatggggatgtccctgtcctgacaggtgaggggcaggacacccaaacacgtatgcaatgcgtacactggaagttaaggtccatgacgacggggactcttttgtttactattgtgttataggaccttaataaatatttcttcagtgagtcactggaaccacacttacagtatattaaaaatatgcatagaacggccgggcacggtggctcacgcctgtaatcccagcactttgggaggccgaggagggtggatcacctgaggtcaggagtttgagaccagcctggccaacatggtgaaaccccgtctccacttaaaatacaaaaaatttgccgggcgtggtggtgggcgcctgtcatcccagttactcgggaggctgaggcaggagaagtgcttgaacctgggaggcggaggttgcagtgagccgagatagcgccattgtactccagcctgggggacaagagtgagacttcgtctccaaaaaaagcatagaacagcaaaatactttttcactcattttttagcaaacatttaaaagatgataacatccaggctgggcatggtggcttacacccataatcccagcattttgggaggccaaggcaggtggatcacttgagctcaggagttcaagaccagcctgagtaaaatagtgagaccccatctgtacaaaaaatacaaaaattagccaagcatggtggcacatgcctgtagtcccagctactcggaaggctgaggtgggaggatggcttgagcctgacaggcagaggttgcagtgagctgagactgcgtcactgcactccagcctgggtgacagggcaaggccctgactcaaaaaaataataataaataaaagatgataacattgttttggtgataatgcaggaaaatatgcgctcctcattgctaagtgggcaacactgccacatatagtggcacgggctatgcactgcacaactgcataattgtaagagtgttaccggtggagggtgtccaggttcttggcgtcttgaacaaataattggacaaaacgctcaaacaaagcaaggaaagaatgaagcaacaaaagcagaaatttattgaaaatgaaagtacactccacagtttgggaatggacccaagcataggggctcaagggccccgttacagaatttttgggagtttaaataccccctagaggattccattggttacttcatgtatgccctgtgtaaatgaagaggatgaagtaaagttacaaagtcatttacttggtgtatgcctcatggagaggatatttcctgtcatagctgaagtgtgaattggccttatgttccctgcctccagaccctattttcctgcctcaagaggaagacctgatggaagggattttgataaaatgtatcaaaagcctgaaaagtgtacatactttttgaaccaagagttctactacttctaggatttagctttaaggaataactgtgaggtgaatgaagatttagccaaggatcttcatcacatcgtttatagtagtgaaaaaaagtctaggtgattaaaaatagtgattgactaaagagtgtcacacacacactcatatagcagatcgctcttcaggaatttaaatgacactccaagaataaatttaataacccaggcaagtagtggcatatgcagtagaaacccacttttaaaaggtgtgggtatatatatgtatatgaatttttatgtgtgtgcacaggaaaaaaacctagaataaacctagaataaataaataaatcggggtgaagaattacaaatgctagtaattttattgtttttggtttttatctattaaataatttttccaaaatgaatatgcattagctgcatgttttataaaattaaaaaaaaaacttattttaaaaatactggaagaaaagacaataatgaattattacaagttgttttggaagggataagattttgaattcttctatacctctcttactataaagctgtagtaattttataatggaaaaataaacttttagaagagaaataggagatttggggatcaagtggatagattagcacatgctaaaatctatctttttacttgaaaaacacaaaaatgatagaaaaaatttttaaatacatacataaatataaacatatacactcattctcaaaatctttctcgaccagaaaccaaaaataaaggtcccactgttggaagtagggattgaacctcaagacctgcgggagctgggtctggaaacaggctttgggcctgtggtagccagccttcaggatggtcccggatgacacttacctcctaggtattcatgcccttgtgtagtctcctcccacagtgaatcagggctgatctgttactagtagagtatgatgcaagtgacaatgtgtgacttccaaactaggtcataaaaggcactgcagcttccatgttggtcttttggatcactggatctgggggaaaccaaccactgtgttgtgaggacacgcaagcagttctgtggaggctcacgtggagaggaaagaaccaggggaccagctaccttgcaaatcaaccctaacaacttggttgatgacacaaagaccacaaaggaaagagtacatgaagcagggccctttgaacctatggagcacagtttggcactatgtaccaatgacacttgttttaattaacaaaccaatattgatacattattattaactatagtctatattaaggttctctttttttgtattgtacagatctgtggggttttgacaaatgcataatattgtgtatccaccattacactgtcatacagaatagtttttactgccctgaaaagcctctgtgctctacctatttaaccctctgcgctcacaccaaacccctggcaaccactgactgacctttttacattccctatagttctgctttttgcagaatgtcatagtagaaatcatacactatgtagacttttcagactggcttctttcatgtaacaatatgcatttgtttcttccatgtcttttcttagcttggtagctcatttctttctgttgctgaataatattccattgaatggatgtgccagactttgtttattcattcacctattaaaggacatcttggtggcttccagtttctggcaattgtgaataaagctactataaatatttatgtgcaggtttttgtgtggacataagtttacaactcaattgggtaaatatctaggagtgcaattactggatcatatggtgcaaatatgtttagttttataaggaactgctgaactcttccaaagtagctgtagcgttttgcattctcaccagcaatgaaagagcattctgttgccagcatttggtgttgtcagttttgtggattttagtcactctaaaagatatgtagtgaaatctcattttaatttgcaatctcctaatgacatatgatgtggatcttcatctctatgcttatttgtcacctgcatattttctttagtgaggtgtaattttcagaccttttgcccatgtaaaaaattaggttcttttcttattgttgagttttaagtgtttataattttgaataccagtcctttatcagttaatgtgttttgcaaataacttctaatctttggcttaccttttcattctcttaacattctttcacagagcagaagtttttaattttaataaagttcagtttaagaattttttgttccatgggttgtgcttttggtgttgaatttaaaaactcatcgccaaaccacaaaccacatagattggttcctatattagcttctgtaagttttgtagttttatgtttcacatttaagtctaagatccattttgatctaacttttataaaaggtggaaggactgtctggattttcccatttgttaaaaagattctcctcttccctcttcctgcactgaattgcctttgcttctttgacaaatataatttgactatatttatgtgggtgtatttctgggctctctattctgtgctgttgatcagtttgtctgttttttcaccaataccacacagtcttgcctaatgtagatttatagtaagtcataaagtcaggtagtgttaatcctctgactttgttccttttcaggattgtgttggtcattctaggtcatttgacttcccatattaactttagaatctgtcaatattcacaaaataacttattcgaattttattggaattgtgttgaatctatagatagggttggggagaattctcgtcttaaaattattgagttttgctattcatgtacatggaatatctctccatttatttatattttctttgatttttgtcatcagagttttctgtgtttccttatattgatcctgtacatattttgttggatttatgcctaggtatttcattatttttggtggtaatgtaaatggcattatgtttctaatttcagcttccaactgttcattgatggcataaaggaaagcactaaacttttaaatattaactttatattctgtgaacttcctataatcacttattagttccaggagtcttttgttgttgaatctttgggattttctatgttagacaatcatgccacactgtacacagaaataaagacagctttatttcttctttcccaattggcatgccttttattctcttttcttgtcttattgcactagcaagaaattctagtgcaatattaaataggagtggcgaaaggggacatctttgccttgttcccaatattaggggggaaaacatccagtttctcatcattaagtatgatgttagttgtagaattattgtaactcccgtttgttaatttgagaatgtttcctattactcctaggtcgctgcgagtttttattatgaaagggtgttggattttggcaatgccttttttgcatccattgatatgatcgatcacatgattttcttcttaaacttattgatttgatgaattacattaattgatttttgaatgttgaaccagttgttcctgcctggaataaatcctgcttggtcaaatcatggtgtataatgatttttatacattgttggatttgatttgctaatttttttaaaaaaaaattgggggtacatagtaggtatatatatttatggggtacatgtgatattttgattcaggcattcaatgtgtaataatcacatcagtgtaagtggggtatccatcacctcaagcatttatcctttctttgtgttacaaacaatccaattatactcttttagttattttaaaatgtgcaataaattttgttgactgtagtcaccctgttgtgctatcaaatactagatcttattcattctgtctaactatatttttgtacccatttaccatccacatttccctccctactcccccaactacccttcccagcctctggtaagcaccattctacctttatctccatgagttcaattttaaaaaacttttagctcccccaaataagtgagaacatgcaaagtttgtctttctgtgcctggcttatttcacttaacataatgaccttcagtttcatccatgttgttgcaaatgacaggatctcattctttttttatggctgaatagtaccccattgtgtatatgtaccacattttctttattcattcatctattgatggacacttacattgcttctaaatgttggctattgtgaatagtgcagcaataaacatgggagtgcaaatatctctttgatatactgatttcccttcttctgggtattatctagaaatgggattgatggatcatatggtatctctatttttagttttttgatgaacttccaaactgttctccatagtgtttgtaccaatttacattcccaccaacagtgtatgagggttgccttttctttacatcctcatcagcatttgttattgcctgtcttggataaaagccattttaactggggtgagatgatatctcactgtagttttgatttgcatttctctgatgatgataatgatgttaagcaccttttcctacgcctgtttgccatttgtatgtcttcttttgagaaatgtctattcagatgttttgcccattttaaactcagattattagattttttttcctattgagttgtttgagctccttatatattttggttattaatctcctatcaaatggatagtttgcagatattttctcccattctgtgggttgtctctttactttgttgattgtttcttttgctgtgaagaaggtttttaacttcatgtgatcccatttgttcatttttgctttggccgactgtgcttgtaaggtattactttgcccagtccaatgtccaggagagtttctccaatgttttcttttagtagtttcatcgtttgtggtcttagatttcaatctttaatccattttaatttgatttttgtatatattgcaggagatagtctagtttcatgcttctgcatatggatatccagtttctccagcaccatttattgaagagactgtccttttcccaatttatattcttggcatctttgtttaaatagatcagatggattcgtttctgggttctctattctgttccattagtctgtctgtttttatgccattaacatactgttttggttattatagctctgtagtataatttgaagccaggtaatgtgattcctcaagttttgttccttttgctcacaatagctttgggtattctgggtcttttgtggttctatataaattatagaattttttctatttctattaagaatgtcactggtattttgataggaattgcattgactctgtagattgctttggataatatggacattttaacaatattgattcttccaacccatgaacatggaatatctctattttttgtgtcttcctcaatttattttaccaatgttttatagttttcattgtagagatctttcactattttggttaagtttattgttcggtattttatttgtggctattcccaatggaattactttcttgatttcttttttagattgttcatccttggcatatagaaatgctacagatttttgtatgctgattttgtattctgcaactttagtgaatttatctaacagttttttggtggagcctttaggtttttccaaatagaagatcagattgtctaaaaacaagggtaatttgacttcttctttcccagtttggatgccctttctttctttctttcttttgtctgattgctctagctaggacttctagtactatgttgaataatagtgtactgggcatccttggcttattccagatcgtaaaggaaaggattttagtttttctccattcagtatgatagtagtgatgggtctgtcatatatgtcatatatgggttttattatattgcagtacattccttctctacccagttttttgagggtttttatcatgaagggatgttgaattttatcaaatgctttttcagcatcaattaaaatgatcatgtagtttttgtccttcattcttgttgataagatgtatcactgattgaattgcatatgttgaaccatccttttattcctgggatggatgtcacttggtcataattaattattattattattttttgagacagactttcgctcttgtcgcccaggctggagtgcaatggcgcaatctgcaatggctcactgtgacctccgcctcccaggttcaagcaattctcctgcctcagcctcccaagtaggtgggattgcaggcccccaccaccatgcccaggtaatttttgtatttttagtagagatgaggtttcaccatattacaggcgtgagtcactatgcccggccatgaatgattttttaaatgtgtctttgaatttggtttgctagtattttgttgaggatttttgcatcaatgatcatcagggatcctggcctgtagttttctttttttgatgtgtctttctctggttttggtatcagagtaatactggccttgtagcatgagtttggaagtattcccttctcctctatttttcagaatagtttgagtaggattggtattagttcttctttaaatgtttggtaaaattcagcagtgcagcaattgggtcccgggcttttctttgctgtgagactttttattatggctttgatctcattgcttgttattagtctgttcaggttttggatttcttcatagttcaatctgggtaggttgatttatctatttcttctagattttccaatttattggcatatagttgctcatagtagtgtctaataatagtagtgtctttgaatttctgcagtatcagttttaatgtctccttttcatctctgattttattagtgtctcctctctttttttttcttagttgggctaaatttatcaacattgtttgtcttttcaaaaaaacaaatttttgtttcattgatctgtattttttaatttcaattttatttacttctgctctgatctttatttcttctactgattttgggttttgcttttgcttttctagttttttaagatgcatcattagattatttgaagtttttctacttttttgatgtaggtgcttattgctgtaaattttcctcttagtgctgcttttgttgtatcccatagggtttggtatgttgtgtttccgtattcatttatttcaacaaatttttttcttttttcttatttttttctacttgtaaattttttatacgataacaaaatgtttttcactttccttcttaaatttctttattgacccactagtcatttaggagcatattgtttaatttccatgtgcttggacagtttccaaaattcctcttgttattggatttctagttttattccactgtggtcagagaagatacttgatagtatttcaatttttgggaatttttacatacttgttctggggcctaacatatggtctatccttgagaatgatctatgtgcagagaagaatgtgtattttgcagtcattggataaactgttctataaatatcttttaggtccatttggtctatagatggaatctatagttcagattaagtccaatgtttctttgttgattttctgtctggatgatctgttcaatgctgcatgtgggatgctgaagtctccagttattgtactggagtctgtctctctagctctaataatatatactttatatatctgggtgatccagtgttgagtgcatataggtttacaattgttatattctcttgatgaattgacccctttattatataatgatcttctttgtctctttttatagtttttgtcttgaaatatactgctcttttttggtttccatttgcaaggaatgtctttttccatccctttattttcagtttacgtgtgtctttaaagtgtgtttcttgtaggcaagacattattgggtcttatttttttaaaatccattcagccacccttccttccttcccttccttcctccctccctccctccctccctgcctgcctgccttctttccttccttccttccttcctttccttccttcctttccttccttccttccttccttccttccttccttccttcctttccttccttccttccttccttccttccttccttccttccttctttcctttctttctctttctttctttcgatggagcctttctctgtcacccaggctggagtgcagtagcacaatcttggctcactgcaacctccagcgcccaggttcaagcaatcttcttgcctcagcctcccaagtagctgggactacagacgcgccatgatgcctggctagttttttgtgtttttagtagagagacggggttttgccatgttggcaaggctggtctcaaactcctgacctcaggtgatccacctaccttggcctcccaaagtgctgggattacaggtgtaagccactgtggccggcctactttatgtcttctaactggagagtttagtccatttgtcttcaatgttattattgataagcacttactcttgccattttgttatttgttttctggttgttttgtagtcttcttttccttctttccttcctttccatcttccttttaatgaaggtgacttctcaggtggtatgttttaatttcttgctattacttttgtgtatccattgtatgtttttttatttgaggccaccataaggcttgcaaataatatcttgtaacccattattttaaactgatgacaacttaacaatgattgcataagcaaactaacaagcaaagagatgaataaaaactctacactttaacttcatccccttgcttttgactttttgttgtttctatttatatcttattatactatgtcttgaaaagttgtagttattatttttgacagggtcatcatttagtctttctactcaagagatcagtagtttacacactacagttacagtgttatattctgtgtctttctgtgtacttatgattatctgtgaattttatactttcagatgattttttttttttttttgagacagggactcactgtcaccctcgctggactgcaatggagtgtggctcactgcagcctcaacctcccaggctcaagcaatcctctcatcccagactttcaaatagttgggacttcaggcacataccaccatgcccagctaatttttactttttgtagagatggggtttcattatgttacccaggctggtcttgaactcctggacacaagcaatcccccaaccttggcttcccaaagggctgggattaaaggtgtgagcccccagatgatttcttattgctcaataacatcctttttgtttttttaattgaagaaattcctttagcatttcttgtaggacagatctggtgttgataaaatccctcaggttttgtttgtctgggaaagtcgttatttttccttcatgtttgaaggatattttcactggataaattccagtataaaaaggttagtttttctttagccctttaagtatgtcatgctagtttctctcctggcctgtaaggtttccactaagaagtctgttaccagatgtattggagctcctttgtatgttatttgtttctttggctgcttttaggatccttttttatctttgacttttgggagtctgattattaaatgtcttgaggtagtcttatttgggttaaatctgcttggtgttctatataaccttcttgtatttgaatattgatatatctctaggtttgagaagttctctgttattatccttttgaataaactttctaccctagtccctctctctactgcctctttatggccagtaactcttagatttgccctttggaggctattttctagatcttgtaagcatgcttcattctttcttattcttttttcttttgtctcctgactgtattttaaaatacactgtcttcaagctcattaattctttcttctgcttgacaaattctgctgttaggagactctgatgcattcttcagtatgtcagttgcatttttcagctccagagtttctgcttggttctgtttaattatttcaacttctttgttaaatttatctgataggattctgaatttcttctctgttatcaacatgattttgttgagtttcttcaaaatggctattttgaattatctatccaaatattcatcaatctctgtctgagattggccccaggtgggtccatagatgtcgtccagaaggcagggcctgtagttgggaaccttaggagtctacctgatgctctattctactgcggctgagcttgcatccaagccacaagacaaagtcctttccactattccctcccctttcctcaggcagaggagtctccccatggccaccactgtcctaggcccgtggtgagtactgcctggctaccacctatgttcattcaagacccaagggctcttcagtcagcttatggtgaatgcttgtagtcctgattctctcctttcagggcagtgggcttacctctggcccagtacaggtccagaaatgccatccaggagccaagacctggaatcggggccccagagtcccacttggtactcggtactctacccaactgtggccaagctggtacccaagctgcaagacaaagtcccctttactcttccctctcctttccttaggcagaaggggtctctccctgaggccaccgtagctgggaatgtactgggtcacacatgaagccagtgtggctctgagtctcacccaaggcctgcggccagtactacttggctaacactgctgattattcaaggccaaagggccctttagtcagcaggtgatgaattttgccagaactgggtccttctgttctggcagtaggttcctttctggtaagtttagaaatgtcatccagaagctagagcctggaacgagtgcctcagacctctgcttagtgtcctattctactgtggctgagctagtatccaatttgccaaaaaaaaagccctgtttactcttctcctcctctcctcaagcagagggaaagagtctttcctggagctgtaagctgtgctgcctggagttgggggagagatgacacaagcactcccttgatcaccccagctggtgtctcactaggtcacatgcctcccaagtacactggctccgaacacagcatagcaccaggacttgcccaggaattgcagtccttctggtccagacggccttccaaatttatttaggaccccagagcactttagcccactttggcggggtttgccagaactcacgttctgactgctgggatggatgatttgcccctggctaggacatgggcactcgcgaagttctgccccgttgctttccactgtgagagggcggcactgagttccattgcagtgtcccacaatcactgtgctctcttccagaagtgcacatattctctctccataccacactcagtgcctctttctttaatatgattttaatatcaagtactgtaatcacttgtctgatttttggctcctatgaaggtgcttttttgtgtggatcattgtgcaatttggtgttcttgcagggtagacaattgctggaggcttcttttcagccatcttgctccacctcctcctgatttgctagtattttattgaggagttgtacatctgtgttcctgagagattggtttttaattttcctttattataatatcttaatctcgtttcggtattagggtagtgctggcctcataggatgagttaagaagtattccctctgcttccgttttctggaagaaattgcagagaattgatactatttattccttaaacatttggtttcaccagtgaaaccagtgaaaccatctgggtcttgtactttctttttttggaaggttactaattattaattcagtataaaaccagccttgcattttaagaatgagtgagaggcatacagtttaattccatcacaactgatcagaaaacatacttcacataacttcaattattttaaatttgttaaagtttgttttatgtcccaggatatggtctatcttggtaaatgttccatgtgcacttgaaaaaaaaatgtgtattctgctgctgttggatggaatgttctagaaatgtcacttaaatgttgttgctcatgttgttaatttcttctaatctttgatgatttttttttttttgtctaatggttctatcagttagtgatagaaggatgttgaagtccacgctgtaattgtggatttatctatttcttctttcaattctgtcagttttcacattattttataactttgttgttcagtgcatactattttagggttgttgagtcctcttggcttggggtttgctcattttcttaaatctgaagatttacaccttccaccaaatttggggagttttcagctatgatttctttaagtatattttcagcactgcactctttctcttgtccttatggaacttcaatagctctaaagagtatttagatcttggagtattttcccataggtccttaaagtcctattcatttttaaaaaatctattgtcttttttttcctctgttcagactgtgtaacttttattggtttgtcttcaagttcaatgtttctttcctctgtcatctccactctgccattgtgtccatccaatgagtttgtttctgttattgtgtatatatatatatttttaagttctaaaacttccatctggggctgggtgtggtggctcatgcctgtaatcccagcactttgggaggctgaggcgggcagatcactttagtccgtgagtttcagaccagcctgggcaacatggcgaaactccatctctataaaaaatacaaaaaattagctgcgcatgaaggcatgtgcctgtagtcccagctattcacgatgctgaggtggaaggatcgcttgagcccaagaggtggagcttgcaggtgagctgagatcacgccacagcgctccagcctgggtgacagagacaaaccctgtctcaaaagaaataagttaataaataaaaaataaaataggctgggcacagtggctcacacctgtaatcccagcgctttgggaggctgaggcaggcagactgcttgagcacaagagtttgagagcagcctgggcaatgtagtgagaccctgtctctatttttttaaaaatgatttaaaataaaataaatcttccatttggggtttctttttctttttttttctttttttaagatggagtttcactctttgttgtccaggctggagtgcaatggcacaatcttgactcaccacaacctccgcctcccgggtttaagcgattctcctgcctcagcctcccaagaagctgggattacaggtgcacgccaccacgcccagctaattttgtatttttagcacagacggggtttctccatgttggtcaggctggtctcaaactcctgacctcaggtgatccgcccaccttgggctcccaaaatgctgggattacaggcatgagccaccgcacccggctggggtttctttgtatcttttatttattgaacctttgttttttgagtgttcatagtttcttgttaaaagtgtttttgtttgttttttaatgatagctgctttaaaaatccttgccagacaatcccaacatcagtaccatcttggtattggcatctgttgattgcctgttctcattctggttgactttttctgttttctgacatgacaagtaatattcaatattatcagtactttgggtattatgaaactctgattcctttttatattttctactttagcatgcattcaacctgcttcaattcagaatgcacatcatgactcacttctgtggtctgtgagtttgaatgtcagtttggtttcaaattcagcgttatcttggtctgctctgcctgtgtgctacccagagaccagtggatacccagaaacccgagtggtattccacagcatagctcagttcttaaagcttttgctgtgttaattctgatgagtttcacacataggccacttggggatgtgcacaaattgaaagacgctttttccgcagctccctcctctctgttattctgcccacactctctgtgagggggtaggtgctgcctctgttactgcaggacaggtggtagtcaacagggctctaccctagagtgtccatagcatcccatgggaagaaggaggagggagggggtgtcacctcttatcccattagtgcaggatggggctcattaatagagctccacttgtctccagaatcactggtgaggaaggggagtgttgcccccacattcgtgcacagcagggatggttcaccgaactccacaccagtctctgcagagcctgttggggagaggagggctgtggtttctttgatggtgttcacctggagtagagcaagtattgtcaaaagggtcatcctcggaggttgcagtgagccgagatcgcaccattgcactgcagcctgggagacagagcaagactccatctcaaaaaaaaaaaaaaaaaaaaaggccatccttcattactgtcctcttctaggtcctttgactagagaaagcattttccttaggacttttgttgtctgtgcttgttggtcatttcagattgtgccttcctctagtgcccaggttgaaatacgtgaacactacgaaagcctctgggaactccctgccaggtcatcccttgagacttaagtttccttgccagtctgcctagtttacttcacctttagaggtttctgatagttgctttatgtattttgtctagtttttagttgtaattagcagaaggaatagggtggagtccacttactttatcttgtgtgaacatggaagccccatgtattttttaaataaactttttgaggtgtaatttacatgaaataaaatgtacccatttaaagtatacatttccatgagattgacaaatgtgtatatccatgtaaccctaaccacaatcaagatatagaacactcccattaccccaaaaggttccctttgtcttccttcctagtcagtttcctccatcctgagcctcagacctggcctgatttctgccagtgtaagttgaacttgtcttttctagagttccatatgaagaaaatcacatagaacgtaatgtttgtaaaagtctgggccgggcacggtggctcacgcctgtaatcccagcacttttggaggccaaggtgggtggatcacaaggtcaggagatcgagaccatcctggccaacatggtgaaactccatctctactaaaaatacaaaaattagctgggcatggtggcacatgcctgtaatcccagctactcaggaggctgaggcaggagaatcgcttgaaccagggagtcggaggttgcaatgagccgagatcgcgccacagcgctccagcctggtgacagagtgagcttccgtctcaaaaaaaaaaaaaagtctggttccttttacttattataatatctgtgagattcatccatattgttggcatttcagtagttcattcctttttatgtttgtttttgctttcatttgaattgtcactatcctatgctcttgcctgacagaccctgagagcctactgaccacagcagctcctgttaccacggctgccgtttctgctctcaatgctactgctcattgatcccagggaggaaaattctggtgcatcacttagtatttatttcaggtatggttaggacatttcagaataaaggatggcttcttctggatgtatctgaattgatctgctgtcatatacttatgaatcacatgctcagaccaaagtacataaaaaagtcattctctttccagacaattttaggggtttgtaaccttggtcttatattgctccatggcctatgaattagtaacaggactagtgaaattcctagtaacatagtcctgttactacaagattacccatatcctttgatgatccatctactgcaaactcatagaatttactggacagtcttcttcattttatgtaagaatgaccactgtatcatcatatgtcaatgtcctgcataactgtcaccacccctccatgccgaatacctggtagcttgtgatgagttgagaacctcactaaacagtcttatccacatcctcaggttctctgaggttttccttctgtccagtccatgcacttgtacccctggtggtcgaagtacagtcacgcactgcgtatgatgttctcatcagtggtgggctgcatacacagcagtggtcccataaaaccataatgaagctcaaaaattcctattgccaactggcataacgtcatgtagtgacacatgaccttttctatgtttagatctgttcagatacacaaatccttaccactgtattccaattgcctgtagtattcaacagtcactgtacaaacctgctgtatagttttgtagcctaggagctacaggttgtaccgtatagcctaggtgtgtggtaggtaggctatactatacagatttgtgtaagtatactctatgatgttcacacaatggtgaaatctcctaatgacacatttctcagaatgtctccccatcactttggccagctgactcagtttgtgatggcaattgtgagaccagttgaagggcgatctgacctgtatattctcttggttaattgtatttacaaattggatacatgatttctctgattgctctcttcacaaactacatttgaatatacaaatgaagtgctaagtggtttttatacagggaaacaaagccagttttgttttctaccaatgcaagtttggataaattcttttcaagaagatgactaaatatttcccatttagcaaagtcctcagataaagagatgccaggtatttctcgttatgttggtttctgtattactatctgttcagacacaagcgtccttaaaaatgtgcttagttgtaatttcttcatagatttcaaccaaaacaacatattgcaagattgaatgcagaagtagatgtgagaactcattctattaagccaagcgtaaatgtttaaaaatgtaaaataataccactcttctgatatgttttgggagaaaatatgtttgtggaaaatatacctatcaaagaaatatcagaaaccttccaaactgaaggacatgtgtatccagattaaaatgaccttccaaatgcttaacatagtaaacaaaaaacaggaggaaaaggaggggagaaaagaaaaaaagaagactcacacaaggccgtgttacgacatttcatcataccatagataaatcagatcctgaaagatttcagaaaggaatatgagatcacacataaaggaacaggaatcaaaatgacattacccttctcaacaacactggaagctccaagagagtgcagcaatgctttcatcctcagagaaaataattatcaatacaaaataatattcccagctaagctatcaatcatgagggtagaagaaaggcatttttagccattgcgtgggagtgctataataatggtcccagtgaaccacacctccctgtatccgcaccactttgcaatgagaaatttgctgtttctcctagtgagagagggagtctatttctttacccttgggcctgggctggcctggtgacttgttttgaccaatacatggaagaagtgacattatgtgagttctgcagctgaagctttaagaggccttgaagtttctcctcaccttcttggaaccttgagaccaccatgctgtgagaagcctgggcatatctactggaggccgaggggccacatgacacgtctaaaactcatacgtcaagatatggtaatataatgtgaaattcctagagcagcttaatgctagtctctatttggctacctttttctttagaattgcttatatagttagtgtatgagattttttgttatattttgcaaatattttctctccattatagctcatcatcttttagctttgtttatggcatgtttttatgatagagaagtttcattttttatttttaagtggttacatctattaataatttcctttgtgtctctgaggttttgttgcttaagaaggacttctcaaagatttaaccttattttttacttaaagagcaaaaaaaaaaacaaaaaacaaaaaacaaaacacgatcacaatataagccagtataagcaactggttcgtgcaggatggtggtagttatcaaagagagcggggggtctaaagctctaaggagtcgtctggagaaagccaggcagagacttgctgcttttctattctacttctttcccttctcatccagcttgaaagctgcacccatcaagtgcgtcctgaatctgacgattcactatcttcacttccgccagtctgctccaggcctccatcctttctggcctaaatgaaccccaaagctggcttgtgtcctgcatccatccaccactcttgcccttgtttcacttatctattgctgtgaaataaacttcaaaaccaagtgattcagtctcacaactctggttttcctgggctgagtggggtggttcctctattcatgtgatgtggctggagctgtgggcatttgtgggcttgaatgggctgagtgttcaccgtggttcattcacatggtggcagctggctaggttctcagctaggacgatggcctctccatgtagcttgggctcagagctagtgttctgagaaggaagtagaagctggcagtcctattgaggcctgggcttgaagtcccagaacatcctttcccactgccttgtaatgatcaaagtagtcacaaggccagcctagattcaagggcttggaggaatactacctttcagtcaatttcccagtttccagaggattttaaaaaaacaaacggctcgacacagtggcatgtgctactcgggaggctaaggtgggaggatcgcttgagcctgggaggttgaggttgccgtgagctgtgattacaccactgcactccaacctgggtgacagatcagaccttgtctcaaaacactctccccaaaacaaatagacataattctcctgctggaatccactgctcactagacttacattgtaatagcctgcctcacctggcccctgcctaactctgtccctcacacctttgctctgtctctaaaggtcatactgctgtttccccagcaccccaaactcaccacccttcagggacttagcctagaacaattttcctccaggacttcacttggccacttcactccattgcttccagacggctggcattatttgcccatctgttttgggtctccttcactggcatgaatgtaaggtccttgccagcagcacttttctgtcctatcctacattcactcttagcatctagaatggtgttatcacaggaaaggcataaaagtatactctgtggttaactgaatttacttgcctaaatcttgggcatgtgatgctttgagaaatatacaaattaatgttaaacagaaccacagtggtcagtaacaggcacatccaaggatacactagtcctgcatacatacccactggcatgtttctaccttcctaataagagctgacagccgttttgctgcatgctgtacaggacagctgctgctgcaaactcagcctctgatgggcccatagtcgatgtgcccactgcatgccttgaactcagggaattcagacgaaatcatcacacactccagccagaagctagagggctgccggccttgacattttaatgcatttttggtgtcagctgcccttcactgattcactcaattctagaggtctgaatgagaatccctacacgcttctcaggggttctgaagaagccagtgtagcccaaggtcatcaacccaagtgaacccacatttatccaggaagcaagaggtgtggcaagggcagaattctaacagacatccattccacatgtgtcagagacaaaactaagtccaagataaaatcgacaaaggctatttattcataaacgtgcagcaggggaacccttctgctgaaacctttgttttggtaagtgttcagaggtgttaagacgttatagagtaaaaaggagaaatactgacagtgttgacttggcaaatgtcatataagggtaggatttgtggaagcaagccaagagacaaagtggtcttcaagtacatttgacttgattagcttcaaggaggcaggtgagcagtctgggaccatttcaaaagaggaaaggggcggagagttttctgtggccagccatttcctggaaaaagtgatggttgatgggatgcttttttgcagtctatcatcatggttcttaggggtgtaaaaagtaaagtgaggttcctcttcaaagactttcctccctgtctaattaagaataaatagtaacttctcttaggagcaaaacttattcaaagacctgtgctaacattcttaaatatctgctagccgtaataaagaaatcaatgtactttatgttcttagctcccacaatttagcctatttgccctggcaatgcttatactggtccaagcaagcattaggtcatagcctgttcctcttccttatctgaaggtgtttttacgtttctcagcattccacaagttacttcctccttcattctcctctgcctttgcctcttttaaaaagttctaagttgctagccaatcaggacaaatacagaatgtgaggtcccgttccagccaatggaaactggacacagcagtaaagtggacttgtcaagttataaatgaccctgtctcctttgttcggtgttctctcgtggcaaaactgctggcgagtgtaccctttctgcagaaagtataaaaatgaccttgctgaagaaattaatgttcaagtgctatttctttgcggcactgaagaacaagcatttcaaacagagggtagggtggggtggtggtggtggtgttatgtggttgccacagctaagttaagtttttcacatggatcattaactttcaaataattaaaattttagagatgcaaggtatcttaaagttcatctggtcactctgaccacccacattcccactctcatcccaagttcatttaatggatggaaaaactcaaacaaaaggtagtttggcatctaacccttagcaaaggttagatgtggaattagaagttttcctgaatcctaggactgtagtataaccatcatgcatttcaaaagtaaaacaaaaaaggaaatttaaaaaaagaaaatacagtaagtagccacataaaccgcttctagctgggtccactggtccccctgcttcttgtttattaacggaatctgttcaggggctctagggctcagagctttaggggagtctgagcccttctccagccctggggtgatgggtcttgattgatccaggtcaaattctccacagatttaattctggccaatgaatatgagaagaaatgagaaggtggaaaggtgtcttagtctactttttgctgctataataaaaataccaatacatggggtaaattataatgaagagaaatttatctcatggagttctggaggctggggagtcccaaaatcaaggtgttggcatctggtgaggagcttcttgctgtccaccccatggtggagggtggaagggcagaaagagagagagggctggaggccaataggtggctgaactcatttttttatgaggaacccactcccataataacagcattaatccactcatgagagcagagcccccatgacccaaccatttcccattaggtcctacctccccacacccactgcactggggatcaagtttccaacacatggaactttgggagacacattcacgacatagcagaggaccactggagaaaggaaggtttttaaagattttttttaggacactatggaagtgatagccattggacatggatggtgtttttgtttttggcatgggaaaaggcttatacaactctggtcaacttggcaacactaatcaaaagtcaaaatctcctttgaccctagggatcccctactattaacagtattatatcttatagaacctaggtatttaggaaagaaaaaaatgttcaaagatgtattgacatttaataaaagcaaataactggacataacccagctatccaaatacaggctatcaggaaacactgtgaaggactttgaaataggtcttgcccactgcccccacccctgcctccaattactgagtgttctgtctaatctagcccacctttctgagttgattccctttcatttcactgcctttgagctactttacaattacgtaaattaagggaaactgataatgcagatgattcttgttcatagaaatgcaaattgtgaccaatggaatataactgattattgttctgcaggtatcagccaattttgccagttttgtaactacgaagcaaactcatttcagcattcctgctaggcttataattatttgttctttggattctcctttgagccaattaaagtgtcctactggttctctcaataattaacaagttaaatacaatcatctttaacatgttacttttatatttgtatgagtcataattttaacttctaaaaaaattatcctttaacaaggtagttaagtaaatttaatgttcatgtggtataatttacttagcagccctcttaaaacagttataaaaaccatatggcaacagggacaaatactcctgataaaaatggcaagtggggaaaaaagcagaaatgcaaaatttgtactacgttgtgattaaagctaaacgttgtaagtgcttagggcaagaaataggaaggagaaaaaaaattgaagttggatttgtttgttagggtggtaggatcctggattaaaaaaaaaaaacaaaaccctgacattattctgttatacattaaaaataatattggcgggcatggtggctcacgcctgtaatcccagcactttgggaggccaaggcaggcggatcacgaggtcaggagatcgagaccatcctgctaacacggtgaaacctcatctctacttaaaatacaaaaaattagccaggcgtggtggcacgtgcctgtagtcccagctaccagggaggctgaggcaggagaatcacttgaacctgggaggcggaggttgcagtaagccgagatcacgctaccgcactccagcctgggatacagagtgagactccatctcgggaaaaaaaaaaaaagttggccctgtattagtttcctattgttgctgttaacaaatggtttaaagcaacactaacttatcaccttagtaataaattctgcagttctggaggtcagaagtccaaagtgggcatcacagggctaaaattaaggtatgggtggggctgtgttcctttcaggagtcctaggggaaaatccgtttccttgccctttccagcgtctagaggctgccagcattccttggcttgttgctctccttcctccatcttcaaagccaatagcttagcatcctcaaaagtctgtccaccctcacgtcgccttcactgatgcttatatggatccatgtgcttacactgcatccgcccaggtaaatacagataatcctcctatctcagggtccttacctaaccacatctgcagagtcccttttgccatgtaaggtgacacattcacaggtcctggggattaggatgtggacatctctgaggactcccatccccaatccagaggatttccctgaaatgccaagttcagtgagaacagcttcccatatgcctgagtgaaggcacaatactgactgtgcgaaaggacatagtgtgggactccatttaaattaaatgtcagaacaggcaacactagcctatggtggaaaagaattacaattaccacctccaagggcggggtggggttgactggggaaggccatattggaattttctggtatggtgatgttctttatcctggcaggggcacaaaagtgtaaacaaacactactctctagtctagtcaatgacacgtactgggggaattgtagtgatgtctgccatttactctgaagagacataatggatagtttgatggacagatggatagacaggtgatatatagatacagtaacatgtttatgatagaatctaggtggtgggtatacaggtgttcattttaatcatctttgtgttgtttgagaatttttataaaaatgttggggatggtaagatgtgaccctggaatatgactctggcactctaaaaaccataaattaacaaaaagaacttagaaagccattaagcaagctgttgaataatttcctttttaaaatcaatggttctcaacctgggcaattttggaaggtgtctagaaaggtgtgggagcattcttgacggtctctagaactctcagtaagggcaaagtgttcctggcacccagggcagggtccagagaagctactgcaaccacgcagcctctccacaggactgtctttctacattaaatgttactgaggaataccaatttaaaatcagagtcttctcttcgtatctcattaatttgcttgcagttgcttgtagcacatctccaagtggactgtgactcacttctcaaaaatgtgttgtatctcccacttttctgtaacccaagaaccccgagcatagtgctctacccagaacacatatttaataaacatttggtaacaggggaggggatgttccctgactatcccagcttgccctttcaggcagctcctttgatgcaaacctaccccacattccccctcctctgacccccaacccgttaatagccagtgaggaaggatgttcactgctgcattcttctgccaagacacaatcttgaaactgcatccccactgccaccctccttcaccctgcccaaccccatccccctgcaccaaatggcaggggaggcacctgaaaataaccaccatgacacagagctgagaaaagccggcataaagcacttttattgcaataataaaacttgagactcataaatggtgctgggggaagggtgcagcaacgatttctcaccaaatcactacacaggacagcaaaggggtgagaaggggctgagggaggaaaagccaggaaactgagatcagcagagggagccaagcatcaaaaaacaggagatgctgaagctgcgatgaccagcatcattttcttaagagaacattcaaggatttgtcatgatggctgggctttcactgggtgttaagtctacaaacagcaccttcaattgaaactgtcaattaaagttcttaagatttaggaagtggtggagcttggaaagttatgagattacaaaattcctgaaagtccattagaaaaaccacaggatgaaaaaaaaaaaaggccacaaagaaggcttcagaggtccctgctggcccagggacagatacctgtagtgtccagcattgcagtgaacatgatctactttcaaaggcagagggtttaaggggagggtgggtgggaatggtggaggcaaaggctctccccatccccacctcagttttaggtagggcttttaatttaacccaaagacatctctcaacttggagagtaattcagtcctcaacagcgcctcaaatctgctatggctttgcagcgcagcagcaagaatgtttaatatataatagataaaaatttcatccaaaaaattaaaataaaatattcttgcaaaccccccccccaacaccaattcctattctaatgttaacctaccacttgtgctgttaatacttgaccatgtacttaattggaaacctatatccaaaagactgaaactgaatcttcaccccaaaatgaaaacaaaataaaatgaataacttgaggtttatggcatatagtttaggtaaacacacatacgaggagaaaggggaagaggaaacagaggtgtcggaagcaaagctgagtgacagaacacattcagtcagggcagatgtctatacaaagtggagtggaacatcaggaaaagctccatatggattcatgtgcacatgtctggaggcaccagatccctccatggcagatctgttggggacagaaaatctgtgagtttccagcaactcagtgttctttgtgtgcagtggcgacagccacgatgccatctgccacgccaaatcccttccccaacagctgagcagtctgagaccaagccacttctgttccagctggagacagccagaaagacttgggctgggtcccaggtgaaacaaactttctccttaaattgatctgtgtgttttgtttaatctaaggttaagtttgccttgctgaggacagcaggagggctagccacccatgctgctgacaatacagttccccactatcattgggtctcaaactgtgctacatataggcatcacctgggggctttaaaaaactcttaatgcctgggttccactcccatgattatgattaactggtttagggtttgacctgggcatcaggaaagtcttaaaaatttcccaggtgactctcatgtgcagtccagactgagaataaactggtcattcataatgttgagtatactgggaaaatatctccagtattcattcattcactcaacttaaaactttctgggtttgcccttggattttccttccagactcttgcaagaagctgagacattctttggcagtgggttgggagggttactcggggtgacttgtagcctttatccctctctcccctccctctacctcatcaagtttacagaaagcctgttcccaaccaggaaaataattccaaggctccctcgagtacagttatgttcaaaaaatgactcagctctcaaagaacaggaaagggattttggcctaggtgcagacctctgggcagacaaaggccctgtaaagtgccagggattccctcccagtagcaatgacaggtgaagaaaccagttatcaaacttaaccaggcctgtattaccaaggtgtgtgtggttcaaacagagagtttaaaaagcccctccacttacagatgtgcacaacaggaccaggttacaagtagctctgactgccatcacaaataggatggcagccatttgttgtggctttcaaacaaaagtgtcctcacccaggccttggctgtgaccctctggttcctatggcaggaggggagcaaataaaaaggtctggggccagttggaaggaagccagtagcattcatgtacttaatgattctaacacttacatgaaaagttacgtgctactaggatactgagtttagttcctaagaaatgagggtggaagaggggaaaatcaacaaacaggggctctggtcctactttgccactgcctggatgtgaccttgagtaaggcctttctctctggccctgtttccttactgttgcacaataaagctgatgcagaggcccctaagatcccttcctagaactgtctgatctaagagcatcctttcaacttcacaagcatcctctggcttcatttttccacttcactcactgataagctggcctgggggcctcaagtgtcctgggtgtggaccctgagcaggtggaccgatgcaggaatgcctccctcataccatctaataggcagtaaccacaaaccacagtgaagagagagccgcagaagctaggacatgatattcatatccaaagggctttttttttccccctctagcttctagaaacacagggtagaacaaagtcattcattaagagtcttatttccaaagaactaaaatgttggcactacaaatttggcctacatttccatagtcctcaattcagttttaatttataaactacatagaaaaacatttaaacagctgccatctccatgagttgaactgggaacatacacatgccaattcctttccttagggtgaccaatttttacattcaaagcatacactaataacactgaaaggatactcaatacagaaagaatgcagggggaaaaatagccttgtggtgttttttgttctctctgctacccatcaaacgctgggcataacatgggaggagcaaaggcagtgaagggcccttcagtattccatttccttacccaagaacagggagctaagggaggaggccattcctgtcattccagttttagaagctccacatcgaagacgagagtggcatgtggtgggatgatgcctgggtgcccagtggcaccataggcataatctggagatatagtcagtttggctctctgacccacactcatctgtgaaaagaacaaggaagacagactcagctggacacatgccccaactgtctctgtaagaaaaagagctgtttacctaggtgttccttggccaggatggtattgactttccagtgactttgcagctgcccaggcatcaccacctccttgtgcaggacttggaggttggcagtcatattccatcacccctgcatctcactccaagaagcccaatggcagttcaaaacccctcctgactctcagaacggtcaggccctcaacctttctacgcaagtcttaatgactaatgctaggcaggtaacattccagatgtctcaccacctagtccccttcagtgatctgtcacttaaaggacatgttaagtgccatctatgctcttcttgaaaaaggaatactcaactttgctttaaaaaaatatatacacaggaagtaatacttgagggtagtctattttttctgtattttttctatttatactcttttacccatataggaaaacttcaaaaaagacaatatgattttctgggctacaaaatagcatttactgaataccatttgtgaaaatattgatatgcctacaacagaaaacatctttggaaggacataccagacatttgctgtgaggagaacagtatggatagtgagtgaccagtaaggagagatttctactttaaaaaatatatttgtgtatattttcagtttcaaattaaatacacaaataagtataaaatatctactttctgaacagtgagcaggttctctgcagtatttccatcctttgacttatctctgcttttggtctccatgtgtatgttcccgactttccaactccaccagacagaggatgaataaagaggaagctccaggctgtgaagcgtctagtccttgctcccctcagaagctgggacatgttggaccaaggtggtaaggatagtgaggtatggctttaccttgtacaattcaaaacaatcatattccttgactcagcaattctatttccagaatattctgctaacaactcaaaagtccatcacagaaggagtggtttcataggcatatccacaccagggattagtcatgagaaatcatatagtggtggctttaaatgtattaacatgaaaagatgtccaagatggatgaaagaaagctgccaaaatggtccttgtggcaggcaggactccacgcctgcaaacatgtaaaaccaaaacaatatcaaaaggaaaggaaaagggtcacaagtcaatctccccttcttcctgtgtttttaactcacttggtgaaaaaatatgctatgaagaatttaaaagatattttatgtagatctcaaactacccagacttctcacaaatgacagggctgtgactgaccccaaaataccagttaaagggggagtcaggcatctgtccaatactcgaccatgcctctccaagcctgggaagtgaagtaggccgataacactatctcgatggcagatacagcactcagtacatacaacgcagtgattgttccaatgctggagcagtcacagaagatgggttgtggtatgaacaatggctggcatgaaagatgggggatgggctacagatccaagagccagacagactagggagacagaggcaaaaagctatggttggcaaggtttcccaagggaagtaaactacaaagcctcttcctcacactgccaaccctctgccctgcaggaacagaaacccagacacctgggagtgggatggcttcaagttcctgaaagttgagcagtttatttggagataaatcagtgatattttatagaggaagtagagcaatgtgtattctggaaaagagagagacagaaatctgtcttttcatcttggttaaatttctaattctcctgggtgagagggaagcagactaattacccatcatgcagagcctaattataaagttccttgggtctcaggtcactgaaaaacatccctttacctggttagagccaagaaaaaattcctaggtttgatggaaagacagaatccaactaaaatttggcaaccctgggtccctattgtctcctgggaattttgtagtgttggcagaacaaaagctgtttccacaaatggggaggaaagagattaggaaacacactcaagacaaacgaaatgactttctccataagtatgacgtctcagaagtggtctcacacaatatgggtaatagataaatacaaattaaaaccactgatatcatgttttactcttattgtccagaggccaaagatttaacaatatactgtgatgctggggctgggaggagattgcacctttatagcctggtggtggcagtccagagtgcaacccctagagatggtaacttgacaagacctctcaaaaacactacacacagcttttgagcccctcatcccacttctgagagtaagtcctatggcaacatgtgcacacgtggaaaatgaagtctgtacaaggtgagttactgcagcattgtttataatagcaaaatactggaaatgactcaaatactcattaatagggcactagccaagtaaattatagcacacttacataaacgaatactaggcagctgtaacagagcttactcctcattttttctttcttttttgaaatggagtttcgctctcgtcatccaggctggagcgcaatggcacaatcttggctcactacaacctccgcctgctgggttcaagtgattctcctgcctcggcctcccaagtagctgggattacaggcacctgccaccacgcccggctaatttttgtatttttaatggagatggggtttcgccatgttggccaggctggtctcgaactccggacctcaggtgatccatccatcttggcctcccaaagtgctgggattacaggaactcctgacctcaggtgatccacccatcttggcctcccaaagtgctggaattacaggcatgagccaccgcgcccagcctactcctcttttatgtagtggtattgcaagtgtcaaaaatgcattaagtgaaaaagtaaactgcaaaacagtatgtgtgtgaaagcaagaaaaaagttatgtttttatatgtgcttaaaccacagtacaagaaacattaacaacaggagcttcttgtgggggtattggtcagatgggatggcatgagggtgagacttttcactttttttatttttgaaccgtataaatatgccacctataaaaaaatataaaaggtaaatactagaaagcaaaacaaaacaaatgagagagcatacctgggcaaccccttcttcccagcctcggatcacctcctgcttgcctagcataaacttaaagggcttgtttctgtcccgggaggaatcaaatttctttccatcttcaagcatccctgtgaaaaagacgactgtaacatgagcagcagagtaatgacacaagacaagtcagaaaccagcagcagagcactcatcagagatgccagtgctgaagagtctggcaggaactgcagtatctagggagggtttcctgtgacctcactggacatctaaggagttgcgacagtcctactccagacctgtgaatgctcttccctgactccaagcaataactcgactacaaaaggaccccgcgtaccagagatgagcggcagtccaccttcttctggagatggggagtataaacttcctcctgccctgactctcccagcaccccgtggattttctccccagctaaaaataactgtggtccctcgaggtgcacactatgtctagaagtcacacacagtgcaagaagcaatattccttcccaaaatcccccatcatctttcacatataatgtgtgtatatattgctcctccattgttcagtgcaggcaaatccccctccaccatctgccacccccatgggctcctctgtggttcactaattgtgacctacacacattgctgctctccaggctgtgggtcagcactatgggatgtggtaagaggaagctataaggcaagctttcaccctcattctagtgccaagtgtctcacaccaacagggaacctggggcgtaaagctggccccttgtaggctggttcctgagttgtcataattttcctgggaaagtaaaaaccaacctaggctgaaatagagaaatgaaagaaagaatttgtgcagcattcatcccacttattttatccaatgctgccccacaaaacaacccatgctcatttttgcacagctaatactttgtaacagagatgactgaagagaacaggaatactaaggaggttgcagtggtggcccttcaagaattaactcagtaaacccagccaactgctagcaactctgtggccagtggttccactctgagttactctaaatgggctaggtgctttccacacatgaacgaatgcaattctttctccacagcactatccccatttcacagatgaagaaactgaggcagacagggagaagtgaaaatagtaaatagtaaaatttactattataaaaatagtaaatttataatttagtaaaatagtaaaactacgttataaattataaacccaaataccatgctctttctattattccagtttcccagaagctggacaagccacgacggcgccttccaataaaaggggaactccagagacgctatgagaaaagaggaacagacatctgcaatagatatctgcaacttccttttcaaaaacaccatcggcattgctttctcaggaagccactgccagcctattgtgatagctgacactgagttcctgagaattctctaattaggatcccagattggagggtcagccagtggttaacatataatggacacaaaactgattttactggaagactgagggtgggcactcaccatggttctaagcattcattactcagaagatccataaaaacattacagttctgttgtgtaagagtttaggaaaaaaagaaaatcctgacaaaaatcccaacctaaaaaacagtgtcaacatttgtaagtaggatggggaggcagagatgaattggcagtgttatcacagctactggactatgtggactttaacaaagtaagaaacgggtgggggttgggtggtggtatcttaatagagcaggagtagagacggatgtcctggggcagaatgggtaccaatgctgcctgaagcctggagctgggagctgaggactaagaggtagacaggagggtggggaccggtacctgctccaaggaactggtgccccagaactggtgagctggggtatgcatttagctcattcgtttaccagaatgcagtcaccacctgatgaaagaaatgactaatggcaggacttgaacagttctctataaatgagtacctgggagaaaaacaggtctccaggctccacaatacccaataaacacactgcctttagcccacttcaagctgcacttcttacatggaacccaacccaaccaacctcagaggtaagggtgagagcaggcaatgaacagctatgattctccattccctggccaggcagggagcctttccatccaccctcgtgagactgcttgtaacagaaataaggaaaccgactccaaggctcagtaacccacccaaggtcagaaccacggagtggcagggcctgtgagccacaaaggagactgaaaaccagaaagagcttctctctggtctgttattttaagaaaaacatgcccagaggggccacctggaagcaaggctgtgtggcaccctcaccttcctaattaaacaacaacttcccaggagcaacgacagcaacaacagcctggcccagcagatgaactcgaatcaatccaagcccttcccctatacgggtcagtttgggcactactttacctgctgtgaagtctactgggatcttccaggaaagtcccacctcattagtaaaaagaaaaacaaagactcgggaagaaagttcctgccctccctgttgaatgctgtgtgaggataagatgtctggagcatggcagtcaccctgtgactatcagaaggccaggcgtaccacaaggtggtcattccagtgctctgaatcagccccaaaccacttccctcaagactcatgttctgaggtgattaaaagtgtgctttgaaggtaaatctaggatgacagtcaacagatcagtgattgccaggagtcaggggtagagggagggaagaacagatggagcacagagaatttttagggcagtgaaaatgttctgtatgatactatatataatggatacatgccattatacacttgtccaaatgcacagaatgtacaccaccaagagtgaaccctaatgtaaactatggactttgggtgatcatgatgtgtcaatgcaggttcgtcaattgcaacacacgtaccattctagtggggggtgttgataacaggaggctatgcatgtgtgggaccaggggatatatgggaaatctctgtacatgcctctcaattttgctgagaatctgaaactgctcttaatgaagtcttacaaaaataaagaagtctgctttgccttaggttgggtcttcagttacctgcagccaaatgaacacaactggcgtgaggtaaacctctgacacttagtgagcacgctacaatgtagtgctgccacgaaaggaataacaaagaaacagaactcaacaactaaaaccacaaagaactatccctgatccgcgacaatgggaacagtgtctcatgtcaggacccagtacacacccacattttgtctgtgtataaacaaaatttacatgtaagttactacatggcatatacttctcatttttaaaaagaatgctgattgtgacccactacatttatttcatgatgcattaatggttcataacccacaatttggaaagtacggtatacctataaaaaattagccttatttcttgccaaacttgaacacggctctgacctgtgcaagatcgtattttgattgcagtgaaagccacagggtactgagacagactccctaaacttcctttttattcctgatcaaatgcaatgccaagcaacctccagacactacatgcatcaatgtatcaatgttgctttgcctgaggtgagatacttcaactatctatctgactggtaccaggctaggagcactaggcaggacacagcctgaatctgctgctgctgctgctgctgagccagcatggagatgtgtatgttcttcagtggctctatgtgaggatgcctgtctaaccccagctctcctgagcctatcttggacactgaggggcaaacctctccctagtatcttaaaaccataaaagccaggaagcaggatttctaagtaaaggagctttaaacaggacctttgcctaggatcttaattttcctatgctattttggatgctctgttgtccctgggaaaggggcatgagacttgctccagaatttcagaccacagtcaccaactgtcaatctcatctactttctaaggagaaatcttcgcagggcagggttgggtggtggcagtgatgttggggttccttgagtccaaggagaggatttcccataatcgagtccgaaagctaaacaataatcccccgaaatgggtggggtggtatgtgattaagtgggtgtcacacaactggcacaagctacaggacaaggagaaggagggcttccccagtggggaggaacaggccacttatctatggccctaagttgtcagcctgggggagaaggtggaagcagtgtttgttaagctggaatgagtgtgcatgtgtaggaattatgctgttcagtctgtaatgtcaaaacagatagtgagaacttccatttctggtcacggtggaggacaaggatcagatttgttcatgaaacaaccaacaaccaaccaaccaaccccttcctccctacaaaaagtccactaaaacctaaaaaccacctagacaaaatagctacaacgatggtttgtaggacaccagacatctgtaatgaagaacaataaatcctgagacatgggaaacaagggcagccctatatccttgggagtttccagggagagggacctggagtggagctcaaggcacctagagtccataggacacagtaccagcaggagagagctatacagagatccccagagatctgcagggtcctctttgagtattcagcagagtccctctcagtgcatgtatctgagcaaactattcaaggccaggaaaagaactatccaaaaggcttagaggaacagtatccagtgctcacacagggctaggattagtgcttactaccccccggtcaaactggagaagctcatgattgacaaagcactgggcagaatactcaggaagatcttgcctatagtaggaaataatcagccctaaactgagctctagacctacctaacaaatcacaaaagcaagactcgcaagcatcaaactgtttccgggtaacttaaatgcttctcagtataaaactcaggaaaatttataggaataaaaatatccagcaccccaaaaggcaaaattcacaatgtctggcatccaaagattaccaggcatgcaaagaggcagaaaacaggacccacaatgaggagacttatcaatcaattgaaagcaacccagaactaacacaaatgttagaattagtagaggagaaccataagactccaactttcagagatgaaaactacaatgtctgagatgaaaattacattgggctgaaatgacaaaatatccacacataacacagtaaaaacttcacaccattatcaagcattaactcaaaatggatcctagacctaaatgttaagtactaaacctatcaaatttatagaagaaaacataggaaagaaatctttgtgacctcgagttgggtgaagatttcttagtatgatgtcaaaaagcactatctataaaagaataaattgaacttcatcaaaataaattcagtactttaaaaagcactgttaagaaaatgaaagacaaaccatacactgggagaaaacttttgcaaagtacatatctgatagaggacttatatccagaatataacaaaccaaaattcaacaattaagaaaaccaataaaaaagggctaaagatttgaacagatacttcattgaaaaagacagagggcaggtaagcatatgaaaagatgctaaacattcctagttattataacaacgcaaattaaaaccactaggaaacgcatctaccaccactgattagaatgagtaaagctaaaaagactgaccacgtcaggtgttagtgaggatgtgaaggaactggtattctcatacactgctagtgggaatataacataaagcttcagaaaacagcttgatagttaagttaaacatacacctcccatatgacccagccattctgatcttgagtatttatccaagagaaatgacaggctatgtccacagaaaaacttgtacacaaatgttcaaagcagatttattagcgatagtcaaaaactataaactaacccaaacatccaccaacgggtaagttggtaaatacatgtttctatatatagaaaaatatttagcaacaaaaaggaacaaacaattgatacatgggacaatacagatgaatctcaaaataattataccaagtgaaagaaggcagacataagagaacgtactgtatgattccatttatataaaactttagaaaatgcaacaaatctacactgacaaaaaagcatatcagtagttgttagaggagggtaaggaggggtgaattcaaagggaaacaatgacacatcaaaatttatgaagctgtacatttttaaaatgtgcagtatattggatttcaatcacgcctcagtaacttttttaaaaaaggaaaagaaaaagagtaggcagtggcatttactaaaatgctatatatgtttagctcccacatacacactggcaatgaatgaaaagtgcttcctctctttggggagggaacaggtaaagcaggcagcaagtcaagtctcagcagctgctccaattttaactctggagatcacttgtgccaggagctggagcccttgaacagtgaaaccacctgccaagttagtgccataatttcctaaagaaagcgtgccctgctcagagaaggcaactgaggttacagtgcagacaagacagctgacagtctttaagctctaaaggccactcagcataaaacatcacaagcattgccttctaattgcagaactgaccaatttcattcctggccgtacaagcctataactcatgcctaacaaactgcctggaatagctccatattcttattttaagtatttagtcttggctctcctgactgaatgcagcccaagctcacagacctggcctgcgttctgtgtcctggtggcacgtatggtgctggtactcaagagcactcttggatttgctttacttgcatgatttttaagaaccagaaggacaagcatgaggccttcatatttagaccttcttccctatatggtaacaagaatatgaggggtaatcccagaatggtaaactttactttaagcacctttagttactaatcagtaagaaaaatgtgaaaatgtgctccagttaaaagcacaagaccatgaaagaagccaaagctatgactgactgcatgcagaggctgttgacgtcatcttcgcctgggtctcctcctgaactgaaatccttggaaagggagcaaaagggtttacaaaacaagacggtgcagagagtctcaagtctgtctactccacagcagcctgctctttcctgttgcttttcaaggaatcagcagagggagacctggccagcagctcctgggcagcaaagtatccccagactgtgttcctggtggttggctcaagccactgaagcggtggttaagactcaagaccaggacctggagattcacaaggaccactgggatactatttcactaataacccaatagaaatggagtcacttccaaggcactctgctttggggaagggcagagtgccatataccttctactgggtaacaggactgaagaaggcacctctacagacttatggcttcactacttgtagtgaaagctcatgactcacaatgcagtttatagttgctcatgaatctttgcaggagtgtttcctataggcagcattttacagggacaaaatatgggaagttttaagattaaaaaaaaaaaaatgactaaactaaaccaaaaatcaaacataacaaaaaaccagaatatcctaagccccaaaccttcaaaataaaataaagtccttgccatttacagtttggagagggaaaaggatttctactttcaacacgcaggtgagtttcttaatgacaaaaagtacaatgaggccagctgcggaggaggctcatgcctgtaatcccagtgctttggaaggccaaggcaggagaatcacttgaggccaggagtttgagactggcatgagtttgcaaccagcctgggcaacacagcaagactcatgtccccaatcctgtttctgcaaaaaattaaaaaaaaaaaaaaaaaaatttagccagacatggtcctagctacttgagtggatcaagtgggagatcacttgagcccagaggtttgaggttgcagtgagctatgaccgcacaagtacactccagactgggcaacagaacgagactctgtctcttaaaaaaaaaaaaaaaggtgtaatggttgaatgggtggaggtagggggagccagtatttttctgcagctttgcatttgaagccactcagaacattcccagatgggcgtatggctcaaggtctaatggtttagctgtttgctttccctcttcttattagacacagaagttctcttaaccaccttttactcagctgccttacttggagactcataaaactcacagccttcgtaccccagcatagtgaagagcactcccctcatgctttagtctctagctcatgatcacttcttcattcccatatgagttctgtgttcacaaagggaggagtggttagctgtgtttgtccccaaatccatttatggtagctatatttactgtgtaaatataatgtaattaaatagtatgtaaatcaataaaatgagtgtgaatacaaacagcggttctagctgactcctgggaaagactcaataaaggcaagtcactaaaaaactattgctagtgaataatcatatgggagactacatttagagaaagaaatcttaaaaatctggaaaggtttggtttttaaatgttctcacaatactctttgctctactttaaaaaaggtcaaattggtttttgcaagaactatgatgggaaactccactagcagagccatcctcaaagataaagacatagtcctttagcaaatgatttatgttagagtttgaaatcaaatgtttacagaagccatgtcacttttatgttagcataccaactacccacttgtctcaatcatgatgggtaaaaagggattctacatttagataggcaaaagatacaaattcaaatcttacattcttattattccatttctgggtctctgtggctgtattccagcacaacctccctgaagtggggttctgagaactccttatgagtgaggggtatgaccaaaggtccaagtgccaacccaaagagggaaccagctcactctcactatcattttcctgagatcaccaacagtgcaagcacatttcccatacgcagtatggaaatgcttctaacctttggctaaatccctttagatcctataaccaaaagtgtattttcaaaggcagggcccatgatgggaagaatatgcaggatccaacggcaataaaaagaacacagaccagaatgcatgccctgtgggtgtgtctctccattttccactttaatcacagtataaataagaggagttactaccacattatatcgcatggggagggggagaaagaaataccactaggccgggtgcagtggctcacgcctgtaatcctagcactttgggaggctgaggcaggtggactgcctgagcttcggagtttgagaccagcctgggcaacatggtgaaaccctgtatctactaaaatacaaaaaatcagccgggcatggtggcgtgcgcctgtagtcccagctacttgggaggctgaggcaggagaactgcttgaacccgggaggcagaggttgcagtgagccgagattgcaccagggcactccagcctgggcgacagagtgagactccatctccaaaaaaatcaaaagaaataccacttaacaatagctagctggaagtggtagaaatatgcattttctatagggtataatggttaaaggcatgagttctggacctctgttacagactattattacaactccctccctggtctccctgcttctgctcttgctctcctacagtctaaacctgacacagcagccagaccctactacccctcggctgaaaaactcctgtgactcccccatctcaggagataaaactcttaaaatggcctacaagaccctctaagaagtgtcaagcctccgcccctaccaccatccctctgacttcacctctgattactcttgtacttttccagtcccagaacattgtttccttatgttctacatacacaccagggatacctccacccgtgggcctttgcatttgctgttctctctgcctaaaatgatcttgctcaaacagtcacataggttacatccttacctccttcaagtctttgctcaaatgtcactttctcattgaggcctttgccaatctatctaaaacctcaaccttttcctattccctccttaacacttactagcttatacacaacagtcttgcttattaatcatatttattatgtcttttccactacagtgtgagatgaaggcaggaactgtgtcttcttcactcctaaattcttggtagccaggacagtgtcttgtacatagcagacattcatcaagtacttacagaaatatcaaaggtacccttttctcctcctggcctgtgtatatacctggaagacgctttcctcctgcctgactgcaccatacacacccaagaccaaatggcacttcctccaagaagttctagcctataggtgtaggttgcctgaggtactttcattgtaactgaccactccctacagggtaagcttcttgagggcaacattgaggctttgcccagctccttatatattcactgagtgaccgagggaatgccaggtcctaactggccactcattcaaacagtcactgaatagctactctatgccaagactgatggggagaccttggagaacaacactagtgtgggtctggcctcctggagccttcagtcggttggggaaagagcagatgtttaactacacggatcctgactatgatgggggctaagaaaatagatgggtgcattgttgcagaattagaagcatgcatgtatgcatccaaagtgttacttaagctgtgctataaagaaaagagcctgtcatgcagtggggagtgggggcagtgtggtggcacctaagcaaaggggcagagacctccatgtgggaaaaggcttggagcattcgaggaatgaatgcaggccaaggtggcttgagctcctgggagaggaagagcaaatgtaacagaaagagacagtagcatctaagaactggttatttctacctccccgactttctgcactgctagaatacacctggtcaaaatcaaaggggtccaggggagggaatgcagagacttggttaagctttttagcaggaaaagaaaacaaaaaaacagaagaaaaaatagaagtaaaaataaacaaatgtcaccatgagcaccaaagggagaactgaatgctatgtgattaagttattcataaccttggcttcttccatgggaaacagcaggtgacaatatttttagagaaaattccaaggcagacaaatgatttccagtttatggatacaataaacccctcagtaattcataaaaatcagtttaagcctaaaaatgttctagttaaaacatctatgagtaaataggtgaatttatggtatgtaaattatattcaataaagctgttaccaagaaaaaaaaaggtcatggaccccactgaaaggaaccagagctctttgaaagatggctgataattggaccagagtagtgaaaccgagaaatggatgaaggaatggtgggagcctgtcaaaaaggtactggagccagcttaaagggctcctactggccaaatttaggatgatattagcatcaaaaagaataatgggtatcattgatcttaaggccctgacaaaaaatttcagcccacagtacagtcaaagcaaatagagggggaaaaagtcacttgcccccactgggaatggcaataccccatcagttaacattcatttttcattttaaaaattggtaattaaaggctgggcacggtggctcatgcctgtactaccagcactttgggaggctaaggagggtggatcacttgaggccaggagtttgagactagcctgggaaacctggcgaaacccgtctctacaaaaaatacaaaaattaggacaggtggcatgcacctgtatgcccaactattcagaaggccggatgggaggccgggatgggagtctgggaggtcgaggctacagtgagccatgatcaagccactgcactccagcctgagtgacagagacactgtctcaaaaaataaaaataaaatttggtatttaaaggtaaagaattactttaccttatcttatagaaggataacagctaataaatttagaaagaatgaaggaattttaaaaatcaacactttgtgaatgccagtgacttcttcaggggagaatgatcagatggtgtaaacaccactaggtgaaaggctgatgagcaagagaccatctatggctacctaagcactccacagatcactgctaaatgcaaagggaaaaatgtacctttacagaaaagatcaaatttagcatcacaactagtgatgtttcccatgtgtgctgaggatgaagtactcacactaaaatgtttaaacggaatctattcagacacttaaaagattaaacatccggttcagaaaatcaaggcagggaacaagttaaacaataccatgagaaaacagtaagacagatgtggagtattctataactagcctgctctctttgaagaaatcagagttattaagaaaaaaacagcgtaaggactcttctagactgagattacagacataacaactgcgatgagtgaggctcaatggaactgtggttttaaaaaagagcaacactttggagacaactgggtagtctcgataggcatttgcttcacagcaggcatcgttactcccattttatagacagcatgtggaagctgggaactgtgggacaatttgttcaagctctcatagcccgttgtatggcagggtcaagatcagaacacagcgaagaacccacatgctctttggggatcactgtccacctggcaccacttctgcccactgcctgagctggcactccacacacctgggatacaaccagtgtcctgtttctgcctttgcccccaaaagcccattgtccacacagtagccagaaggagcgtgggttgggggggcgggggcgggcattaaaagccaagccagccagtggctctcacctgagttagaaaaaggcaacgtttttataaaaaccaacgaggctccaccatcccctcatctcctgccacataccctttcacacaatccacttcctgttcctctaacgcaccggtcttcttactgttcctctaatgcaccgagcaggctccagcctcagggtcctgcactagctcttccctctgcctggatactctagacagccctgtagctccctctccaatgtcctttgagtgaatgttaaaatgccatttttttcagaggccttttccaatcaccctcacgaaaagcagccaacttcccttcccatccctcactctgctttaatctctccagcgcttcttactacctgatgtgctccatggccatactatcagtctcctcatcataagcaaagccccaccagatcaggtctttgtctatttagttcactagccatgtccctagagcctggcttgctgctgttgctcaaaaaacatctgctgtgggaaggcaaagggacttgttgcagccctgcccaacagttacagcctgtgtgcctcaagacagcacacgtcaggggaagccatctgaggcatctctgctgagggtgagcctccctccagacatcagatcaccaaccaagagatacctagcaagggagtggatggaataaagcagaggagaggggggaacaaagctaaggaaaagcaaggggcttgagggaggctgcagcaaagtggccacacctgtcccgggagcctcagcagccttcccagtcaacctcctgaggacatgaggttgaggggctcctggtttttctcagtcagaaaccgggaggctatacctgacttaaacctgatcccaaggacaaaatgtccagttagttactttttaagaagaaaaaagaaaacattccttcaatccccttggggctgctctcacaatggcaggcacacggcctgctgaagtaagtaaaagaggtctaaacctagctgtgtgccaggacaagctaacagtaaagatgacgaagctactggaggcagcagggaggcgccatgagaattccctggctcctaaaggcacttacttggcagcttacctttccaccacctccctcccacctcaatgcctgtcatgctcctaggagatgcttagctggtgatagtgaactttgtattttccctctggtaccacagaggtagtgcaggcattcctttgaggccttgctcatgctgtgctctgccagaaggtcacggaagtcaccagagggacccttgagagtgacatcaaggtgactgacagccattagtggcatttaaagcatccatgtggtaaaggtcagtctgtgctctgcacacctgtgatggctaaggggagattttggccaccttacttccacccctctttctctggacccgtgcccaaatcagctgagtggacacctggcaagagctgactggatcaagagtgttcaccttactcaaactctccttctcagagaagtaacaatcagaatcacagccaagaaatctgagccagatactcaaaagaagacagagaagctggccatggggaggggggaggggggaggggggacgggggagcatgcaggggacttccaccacccaccagttgggagaagcagacaaacacaaatctctaacaggagactactgaggcagtcaggcaggaaacaaaacaaaacacaaaacaacaaccaaaaaacagagatgagaactagaggcatcatgattatttcttttcccttcttaggacccagtgggcttctgcctttgaaaacccctggaacctttataacctccaccttctgatcatgttcccccaagatggattctgttcccagtgacttaaaagccttaactgctacagatgagatctcccagtgcctacccactcctctcacgcccccacaggtctcaaacaggttattcctgggaggctggtgacaaagacccacgggaacaaagccaccagcctgctcgaaaacagtctattctgtgagcatgaggcagagctggcttctcactaaggcgtctttatagggcttatcaaaacgaaatcaaaaagaaagcttttgtcctaatgcatgccagggtcctgctgctgctctggaaacatgtgggtgcgtgccacccgcgagaaaaacacacacttcaagaggcactggaaaccctgatggtgttctgggtctcatgaccatctgttctcataggaaaaggctccagacatgctgtgtggggatatttcacaaagagacatggtgaagtgcggcactgcctacatgctggggtccagtcctgttggcagcaccagaacatgggcgagcatgaggggcagacgtgggagtgggacacatgctgccaagcaccctagtgtggctatgtacaagctagggtggggagggggtgcggcagaaggcagctcctcacggcttgagtcccaatctttgccccagttggctgcggaactgaatgaactgcccactcaccccagcactgtaaatggttactctcctcatccttccgatgacaaatcaccaaaaggatgcgctttcatctaccagacctcccaggctcaggtgctgactgtggcctacaaggacagctatctaaaacatcaaaagcactttccagcttccttcacggacatgagactgcctgctccccagaaagatgggtttcagtaactcctcctttggcagaatttttaaagttctagtccttaacttctacctcctgcccccatttctacccacggggaagggccacagaaataaaagggcatgggaggggggatgttagttgccttttcctctttccagtgaaagtcatttccctcaatagagggatccctccatgtttccatgatttggaagagaaaggtggagcttattcgtgagcaacttggccagaactgcccacagcctactacccaggaggaggaagaggaggagagggagtgggaaaaaaagagggaggaggagggggaacagaggaaagggtgggaaggttgagaaaggggaaggaggagggggagggaaggttattcgtatcaacaactgtggctacaccaatcactgccacccttgtgggacccacagccactgagtctccgccaactcagctctccccctcccccgcccccatacaaaccaggacaagcttgtaaggagaaggagtaagacagccccaaggcacacgactctgatgtctgaattctggctggggagggggaggtgtctaaaatttcctttggcttgtattatcactatgtattagcctccagatgcttatctttaaaatgaggacgagaaaagtctctacttctagaagagctgggggactaaattacacgtgcagctttcggtcagcctgagccagcgctgtcactgagccttggatttgtaagtggctcaaaagtaaaaagacggaagaaggccgtgcagctctacttcccccaaggccaggaagggccaaagcaatgacttaggaagtgggatgtttccccaccctaggcaaaggggcgaattccgagttccccggaggaagcagcagctctgcagactcggaattacctcgtcctcatctccagtgaagggagggatggaagtgggggcaggggcacagaaatggtacaaatccttcctaatggtccctggccagagctctgcccattcctgaaagtgtgaccttgggaaagtgagaccttgggaaagtgacttcgcctcgccaagcctcagtttcctcatctgtgcagcgggcataagggcagcatctaaggtgcagaaatgcttctgacgggtcagataacacctagcccgcagccgacgctcacagccgccgattcagacccgcccgggttccgcaagccccaggctgcccctgagccaccgcccaggcctcagcctcgggccatgcggacctcgccgccgccacgccccggaccccaggccccgggcccccaggcctcgacggccagccgcacccgggctgcggactgcggcccgggccccctccccgctgggcccccgactcaccggtgtagtgcaccacgcaggtctggccgcgcttggggaaggtgcgccctgaggagacagagacgggcatgctgagccgatgcgcgcggcggcagaggtactccgagccgccgcgcgccactactcaccgtctcctggggagatggtttccacctgcactcccatggcggcggcggacgctgagcgggcgggcggcgcgacgggcggcgtggaccaacagcgacctggcggcggttccacggctctgcctagtacctcggcgcgtcgcctgcgcacgcgcacgccccctcacgcccagccctgcgtgcgcgccccacacggcgcgcgacgtcccggaaacccaggcctccggaagagggaccggaagcccagaagccccgagacctccggaagcccggaggcctccggatacagctgtgtttgccgggtgacttgcttcgttctcctgcccttcctctgtgcttccagccggttaagcatctccctgcccaaagaatgggagtaataatagggggtccgccagtcactgactgggtgactgtcatcaggtttccacttagaagcacacagttactcatcctgggaagagcatggttctgagaagacagcgcacaggtggtggtagtatgttagtattttataagtggctcaaggttgtaagttctgcttttcttcactggaggaggagttgtccaaattcattcactcacccatagcttacatgcatacattcttattgagcatgtgaaagttgataatacgaattgggtcactcttcttatgcccaacggaatcagaatccaggggccaggggaaaagcactggaggcacgcagcgcctgctccaagaaccaatatttccactaactgctgcggaaatggcctgctgtccccctgagaccagattcagctagtaactgctgaaacaacccgccataacctaatactagttttacttaccactgtcagtcaccaatcagagcttgccagctccctgaaactttactagtgccaatgcatttccctttctaataaaacgcccagccttctctttgtttttcggacataccaaagaccaccagatctgtgtgtatgctccgagttgcgattctcgcttccccaaataaaacattacatttagagattcatctccatattttattttgactttgacaagcaccttctgtatgtcatgtactgtgctaggtgctgaggatacagcggtgaaggagtcagacttagtccctgacctcacagaatctacgtatgatgtgggagagataatcaaataacctgtttaagtaaaaaaagatacggaataaatgtaaagtttcaaatctgtaatattatgagacagtaatacatgctgtgaggggcgtgttaatataacagagatgcctcacttagtctggaatgtggtcagatatttccctgagttagccaggtttagccaggtttagccaaggttagaaggccaattgtgtgtatgtgttggggtaaggggaggcagaaggagcagtacctgcagaggcactgtaacgcaagagaacactgtgacatggtctaggacataaggaggcacatgtgactaatctttctctgatctgtgtgtgtgtgtgcttctgcattagtcgattctcacactgctataaagaatacctgaggctgggcacggtggctcatgcctgtaatcccagcactttgggaagctgaggcgggcagatcacttgaggccaggcgttcaagaccagcctggccaacatggtgaaacccagtttctactaaaaatacaaaaaaattagccaggcatggtggcacaggcttgtaatcccagccacttgagaggctgaggcataagaattgcttaaaccaggaggcggaggttgtagtgagccaagattgcacctctgcattccagcctgggtgacagagtgagaaccagtctcaaaaaaaaaaaaaaaaaaaaaaaattcctgagactgggtaatttatggaggaaagaggtttaattgactcacagttctgcatggctgggaatcctcaggaaacttacaatcatggcagaaggggaagcaggcatatcttacacagcagcaggcatgagagagagtatgtgaagaggaactgtcaaacacctataaaaccatcatttctcatgagaatgcactcactaccatgagaacagcatgggggaaaccacccccaccatccaatcacctcccaccgggtccctcccttgacctcaggattatagggattacaattcaagataagatttgggtggggacacagaactaaaccataccagctcctgtagtgttttaaacatgacctcacagttttttgacaccccaaccctcatctatgtcccctttcctaaaatctcagtgagctcgtgactgctttggaaattttaatgtagtaagaatacaggctgtaacagaaccaaattaactgtggctgaaaagaggctgaagttgctgtctctctcatgtaacagttcagaggcaggtggttcagtgcaggtaggacttcacaggctgcccagggactcatccttcttctacttgtggctccccatccttagaatcctaccctcatatgcatggtccaagttggctctccaacatattttcatctcagctagtgggaagggggaaaggaggaatggggggtacattcccttttcctttaagggtacgacttagaattgcacacatctcttcccgttatacttcacattgactataacttagttatatggtcaaatttagctgcatgggaggctagggaataaagtcttcattctgggtgtacacacacccaactaaaatcagaggttctgtgctcatagaatggaagaatggagatcgaaagatgaaattaaaaagagggccccagcagtcgccaggacactgcttcacaccacctagagaaaatcagactgcagcgagaataaatgatggagaatgagagcaaccaggggcgagagagttcctggattccgttttccctgaagcctagcagaataaggcttgcctcacattcatcctgtggtctctctcatggctctgaattgggtatcggttcaaaacatagacctgcctttgagacagtggccatctcaatccatggatataagctttgtttatatagatgggggttccccaagaacctcacatttgcaccacttcttcctcagtgctttgggaaaacacaggaaagcatgtagctatcagttctgccaccagacctaagatgaattggacctggggacaaggggcacttattaagcatttatctgattttttgaagtaactgggagagttcctttctaaattaatttagattctgtttatatatagcctagttattaacaactctgttaagtagttaagttctttgggatcacccttagcaaaccagaacaaaaaacagaaagagtgagtgactctaagagatggaactgggagaaagagcaggagattctgactttcatttaatatcattctgaactgattaaatttattttcactctctttgtgtaacaggagacagggaatcatttcagtctgaagtcataagcatccctcatgacaaggggaagtgactccctccctgaagttctaaaacctgaaaaatgggggttggatttcctttggtttatcctgtttgtggtttactcagcttcctgagtctataggtgtatgcctttcaccacatttgggaagttttcagccattatttcttcagatattttcttctgctccattctgtttctcctgttcttctcagatcctggtaacacgaacattagatattttggaattgtctcacaggtgcctgaagttctgttcagctccccccagtcctttttctctgttgttcagattggataatttctatttttctatctttgagatcactggcatgtttccctgcaatctccattctgctattgtacccatctgttgggagctgaaaaggccaaagggattgtgaccaactcagcattccactgaaggatatatgatcaaacagcaaactgtttatcatgaatgcaggatgtgggcaaactcacaactgcgcctgccgccaggaggtttgctgagggccctggcgccatgctcattgagattatctactgggacatctagatcctattgttcaaagactgcagtcttgcaagcctgctgtaaatcaaactgctaaccgacaatcaccccccacttcttgctatctcttttgcctaataaatgtgaagggctctaaagctcaggccccctgtttaccagaagcaaggagccccctgaccccttctttcaaatatgctctcttgtctttgtcttttattcccatgtttgccccctttgttcagtcccccaaggtctgtgcaggtgacaagtggcgacccagaacagggactccaaggatgtcggacacgtggcatctgaacacagggactttgaagacgtgaatgaagaagctctgctggagcagaggaattgaaattgacaagatgaacggggaccccaggatgagtctgctggcagcagatagaaggtcagtgccctaaagaggtactgggaacgatataaggtcagtgctctaaagaagtacttggaatgggaagttttctgaatcagggtaacatgaagcagaatttgtctattgaagaaaaacatcatgtgcagttgcttaaagttctgttgagacagtctggagctcaggttaattcgcaggcactaactaacctcctgcagaagccacaaaaggttattacgcataacccatggtttccacaggcaggcactcttgatgtggaaaattgggatagaccaggagaaggattaaaacaggctcatcaaaaaggtcctaaagttgattcttctgttttctccacttggagtctagttcgtactgttcttctgctatctccttattattctgctggacagcaggctgagtctaaaaaatctgaaagaatctgttgtcccacccacagctccaattgaaaataaaaaatggagagggaggataaaaattggcctacaccgccccctccagttgcagaaacatctgtaccgcctcctttggtagcagaaatagtgaccccaatacaaagaattttatgctctgctgccatagctaaggggagcccttaggaccttgtacttttcctatttctgtaagtgtaacgagtgtagctaataatggggtacagagcccattcactttaggattggtagaatctgcatttggtgctatgtgtcttctaccctttgatgtaaaacacttggctcaaacttgcttgtctgctagtgcatatctgacgtggtatttaaattggcaagaactgtgtgcagaccaggctagacagaaccatattgctggacatggagacattacagaggatatgctattgggtaatggcccttattcagacctggaacgtcaaatggcactcccagacgctgcttatcagcagtgtgcacaggctgctaaacacacctgggccacaattcctgaagagggagtcccagtactgtcctttttacatatcatgcaagggtcacaggaaccctacgcgcagtttcttgcaagattacaagaggcagtgaagcatcaaattcctcttgccactgccacggaaatgctaaccttaactttagcttttgagaatgcaaacgcagattgtaaacgtgcactggcacctgtgaggtgtacaaaaaacttttctcagagcttgtcaggatgtaggaactgagcttcatgggtcttcaatgttagcgcaagcaatggctaatctagcagttgacaaatctaaaaggagccaaggattaagccctaaagtaggaaaatgttataattgtggaaaaactggacattttaaaaaggaatgctgccagatctcaggacagaaaggatcttataatgcagtacccctccctccatagtggaaaacatgccaggactctcctcgctgtaacaaaggaaatcactggggtaatcagtgccgctcaagatttcatcagaatggcatcccccactgtcgggaaacgagaagggggcctggacctgggtccctcaaacaatgagggcattcccagttcagaccacaaccccatttcaggggcgggtcccaggagaaacattgattccctcattccaggaacacccagaagtgcaggattagatctcccagtcagagaacaggtaatgttagttggtggagacaaacctatcaaaattcccactggcatctggggacctttaccagcaggatacaggggactaattttaggcaaaagccaccttaacttgcaaagcattactgtagtcccaggagttgttgactctgattatgaaggagaaattcaagtagttttaatgtcacaagatctttgggtttttgaactgggagaatatatagcacaattattgcttattccctgcaaattatacccttctccactaaaggagaaacaaggaaataaagggtttgggagcacaactacacgagaaatctatttatcacaatctatagcctctagtaggcccacctgtgtagtacaaattaaaggaaagaaattttatgggcttatggacacaagagctgatgtgtcagtaatatccagtaaggactggcccccagcatggcctctcagaataactgccacatccctagtgggagtaggagcagctaaaagtgttcaacagagtgctgagatttttatcttgtcttggtctggatggacaatcatgtacttttcagccttatgttgaaaatatagctatcaatttatggctataaattgatagccatatcagtttatcgagatttacagcatgggatatgagacttacatatgaaaactttgataacccaggatttaaaatgttgaaggacatgggatatcagagtgggaaaggtttagggaaatccctacaaggaaaccctaacccgatatcagtaactggaaaggcaggttaaaccccgcagggagattcttctttagattccccgcggcaattaaccagaggcagaagttgagttcggcaatggcatgcctcccagctacagctacagaaacctttgatttcattatccctcagacaaaattttgcagttttataaagtccattctttcattcttcctgtgattactcatcacaagcttattccaggtggccagacttattttactgatggctcttccaaaggtcatgcagctatttatggacctaaacatactcaaacaataatgacctctggggtttcagctcaacactcagagttgattgcagtcattcaggttttacagctcacagctgcagatcctatcaacattgtctgtgattcagcctatgttgtgaatgtaaccagtcgcatagaaactgctacaattaaaagtactctagaccccgaactgcttaatttgtttcacttattctcatatgctgcctgctacatgccaaacaggtgagacagctggtcatgtacggccacattgtctgtcatcatttgctcatatggggattcctaaacaattaaaaactgacaatggacccgcttatactagtcatgcttttcaaaatttcttacagctttgggctataacccataaaacaggaattccttacatcccttgaggacaaggcattatagagcgggtacatcaaacattacaatgtatgttgaataaacaaaaagggggattaggagaccagttaccacctcaaacaaaattacatttagctttatttactttaaattttttgattcctggtatggatggtaagactccagcagaaagacattggcaagtgttagaggaaaagaggaaagtgtatccaaaagtgttatggaaatccccagaagaaggacaatggaaaggtctggtggctttactgacatggggaagagggtatgcttgtgtttttacaggagatggacaaactgtgtggttgccctcaaggtgtgtgtgaccatggaacaggagactggaggaacccagggtggccagccatgggcctggcccctccagtataggccatgagccagctgagcttgagtgcgaagatgcggagaaggccgaccggggtcacgacacagtcttaatgttacatttgtaaagaatatcaccactcaatttatggtttgtgggtttttttttttttggttttttgttttgttttgttttgttttttttgaggtggagcctttctctgtcacccaggctgcagtgcagtggtgcaatcttggctcaccgcaaactctgcctcccgggttgacaccattctcctgcctcagcctcccgagtagctgggactacaggcacctgccaccatgcctggctaattctttgtattttcagtagggatggggtttcaccatgttggccaggatggtctcaatctcctgacctcatgatctgcccgcctcggcctcccaaagtgcttggattacaggtgtgagccactgcgcccagcacggtttgtgtttttaatccttatgtctttctggcagctaaaaagcaccagctccaggtaaacaacacccaattgacctgtaaatcttgtcagttatatcactgcattaatcacagcacattgcaaacacagaatacctctactttgatcattctgggtcgcatccctggactgtggattcctgttcatccatccaagccttgggctgccacccctgctttacgctttgtgaaacatcttctaactcagcttactcactgtgtccgtagagccttaggcatgatcatttttactattgtttccttagtcacactgataacttctgttgtgatgtcctctgtagctttgcataattctgctcaaatggctcagtacacagagaactggacacagccaaccaagtacagccaaccaagtgtggctacttcagaataaaattaacactgagttacaaactgaagtgacagtgttgaaatccccatggttaggggaacaagtgcaaaggttacaattgcaacagcaattgtgctgtcattttaatcacactcatatttgtgtagccaacttagattataaccaaagtgagtatccgtgggaccttgtgaaagctcatttgcagggagctttcacatccaacatcacctttgatattggtgaattataaaacaaaattcttgatttacataggcaaactcaagagtttcagccttctttagaagactggaccgaattccagcaaggcctggagagcctcaacccttggacctatctaaggccccacattaacatcttatatgtagttcttggaataatgttgttttgtctctgtcttctgttcatcgtctgtgaaatccgttggactgccaattggaaaatgagagctgcccagcctggccttacgttctttcaattaattcataaacagaatgggggaatgttgggagctgaaaaggccaaagggatcatgaccaactcagcattccactggaggctatgtgatcaaacagcaaactgtttatcatgaatgcaggatgtgggcaaacccacgactgcgcctgctgccaggaggtttgccaagagcaatcactccctggcgccatgctcattgaggttgtctactgggacatccagagcctatcgtttgaagaatgcagtcttgcaagcctgctgtaaatcaaactgctgaccaacaatcaccatcacctcttctcactatctcttttgcctaataaatgcgaagggctctaaagctcagggcccttgttcactagaagcaaggagccccctgaccccttctttcaaatatgctctcttgtcttcgtcttttattcccatgtttgccccctttgttcagctccccaaggtccatgcaggttacaagcccatccgggaatttgttcttgttgttctcattttattttttagttctaacatttccactttattcttccttatatgttctattttatttgcttcaactttccatcttggctgagtgtggtggttcacacctgtaatccctgcactttgggaggatgaggcaggcagattgcttgagaccaagagtttgagcaacagcaaaggtgtgtctctaagctaaaacacctacagcctcaaaagcagaatgtgcattctgaaagggcctctgcaaatctgaagtttggaaacatagctgagatggatggggtctgaggtccccaaggtggaactgccaaaactcccaaccaccttcttctccctttgagctcctatggctctcttcttttactcaatggagaaaaccttctggatttgaagtatcaaatgtataaatgtctgacagtatcttgactgtatattttataccttaaagggtttaagaattctggttaagggacagtctctaatggtgaaatttcagacattcatcagtagatggagttgatacatttgagccttatcacagtcttaggaggctccaggaatcagagacatggtctccacttaaatgcccatatcttctcctcaaagaagcttccaatgggctgcccaggttctgcttgaatatctccactgacagggaagccactacctccaggagtagaagctttcacctttggatagtctgtgtattgagtgaaaaggcctgcgggaatggggattagaccagctcttgtgcttgtgggtggaagtgagtacatgaggccaactctgaaggtcctaaatttgatgggcagcaggagggggaggggagatgccttgctgtgtcagtatcatcagggtgtggctgggactgtctagtactgcacaaaacataaggcttgggtgaaactgtagccaaaactcttataaattctatggtggacatttggtgacatttgtcttttccggtaatagcactttggttttcatttggggaagcactccttctccactcttggccatgatgttcaagtggaactaatgcaacactcagctccaggagtggtcatgtgactcaagcccttaaatacagtgactgatttaggaatggacatgtcttagtccattctggctgctgtaacaaaataccataccttgggtgattcataaacaacagaaatttacttctcagagttctggaggctgggaagtccaagatcaaggcagatttcatgtctggtgagagcaagctttctggctcatagatggtgccttcttgctgcatccccacatatgaaaggagtgagaggtctctcttgggcttctttttataaaagaactaatcctgctgggcgcagtggctcacgcctgtaatcccagcactttgggaggctgaggtgggcagatcacctgaggttgggaattcaagaccagcctgaccaacatggagaaactcagtctactaaaaatacaaaattagccgaggtggtggcgcatgcccgtgatcccagctacttgggaggctgaggcaggagaatcgcttgaacccacgaggcggaggttatggagagccaagatcgcaccattgcactccagcctgggcaacaagggcgaaactccgtctcaaaaaaaaaaaagagctcatcctattcatcaggactctaccctcatgacctaattacctcccaaagtctctatctcttaataccatcaccttgtgggttagaaatttcaacatatgaatttggggagtgggacacaaacattccaactataactggctccacagtacagagcaaacagcagagctactggggccagacagagtgccactatggttgggttctgctgagggttctcttcctggcttacagacagctgtcttcttgctgtatcctcacatgtgagagataaagaatgggaagagctagagaaaaacgagagggagagtgcacgctctttgctgtctcttttctctaatcccatcatgagggccctaccctcatgatttcttttttttttttttttttttgagatggagtttcattcttgttgcccaggctagagtgcaatggtgcgatcttggctcactgcaacctccgcctcccagtttcaagcgattctcccacctcagcctctgagtagctgggaccacaggcatgtgccaccatgcccggctaattttgtattcccagtagagacggggtttctccatgttggtcaggctggtctggagctcctgacctcgggtgatcctcccatctccgcctcccaaagtgctgggatcacaggagtgagccaccgtgcccattcatgatttctaaacctcattacctccctgttgtgccaaacccttactgactccaatggggatggcatcaggttcaagaggccaaagaagagacctagagccagcaaatgagacatgaggttttatttggggcttacatacaggagagagagtccagtggtggtgggctggataggagaactgcggtacatacagtccagtggtggcaggctggatgggataaccacatggctcagtggtggtggcctgggcagaagaaccacaactgcttgtaaaagacatgcagtttatatagcattttcacttagcaccctcccccaacagtctccacctagcaacttcacctgacctaaaacaaaaggtctcgatcccctgtatggcccgcattccacaggatgggccataggttcctcatagactcagatgttcctcatacacaaggaaggaatctccaagttggctactcccagatttcctagcttggaacccacattaaggtgcgtctgccatacagagtcattctcagggtatacttaatttattgctattaggtgcatttatcatgcactcccaaaggccctatctccaaataccagtaccttggaggttagggttttagcatatgaatttaggggcaacatagttcagttcatagcaaaaagttaatccccaattcttctgggtgtagttactaattaaaagagaaccctgattatagtagagccagcagtgtcagaatctagatgacccttaagctttccactttatgggccaataaattctttttgctcgtctaaattgaattttctgccacttgcaactaaaagattcttgagtaatatgatccacaaactcgcagatcacttgatctccaaaggctgtacttgctgggtaatcagttgctttgggtgtgtgtgtaatgactgcaggaggttcttacacttaagccttcatcagaatcacctgcagaacttggtagagcccagattgctgtgcttcaaccccagttcctcattctgtaggtctaaggtgcaacttgagaatttccatttctaacaagttctgaaatgatgctgatgctgttagtctgggaatcccactttgaaaaatggtgaaatggaagcccttgcctcctgaaatgaggacacctggaatctttgtggcccaagattgagacaaggggtaggatgaaacttttctttagtgggaaagaaccattttggtatgtcctgggagtcctcaggaagttcagtccttactcttagctcccaaaggggaggtattacagttccagaagagattttcttagagatcctttaaaaatgtctgctgtgcctccctacagggcttttctattgcactcagaaaaaattcaggtgccttacaaggcatttcatgatctggctttgccggggaaagtggaagggatcagaatccttcattcccttgactcttctctcatgttctatgtcagtagctacagggcttatacatgctggaatttcctgggccactctgacagcaaggagcatttttcaggctatgagatgtagcaaaattaatcttcaaaataacaaaaaacacaccagctcttctcctcagctctctaaatgtctaggaaattcttattctgtgttggtctaagctaaactatatctctcagatgctttggagcccaaaaatagttcttagactcccaagtatgtactcagatatttggattgggaattgtgatcagtagatcatagtggctacaaataatgacccatggctttaggaggattcaccaagcagtgtgtaccaagggccaagacgggtcttaatggctccaggagatcaggaaagtggctcttcaccttgtagcaaggcaacaggaagctaactcaaccataagaaatgcagtgatatgtgttttgcctagagtggcttatgtaatccttatcccaacatcactattattacccctcttttacggaagggaaagctgaggcttagtgacatagaataacttgcctatggctacatgtggtagcttgaaaaatggcctctcaaaggtaccaggttctaatctcttaccttgcatggaaacggggcctctgcagatgtgattaagtcaaggatcttgagatgggaaggctgtcatggattagcagggtgggccttaaatgcagttgcatgtatataagaggaaagtagaggaagatttgaccccacacacacagaaaagaaggtactgtgactacagagatgagagatttgaagctgccgaccttgaagattgaagtgctgtgaccataagccaaggaatgatagcagccactagaagctggaagagccaagaacagactgtcccctaggacccccagagggagcatagccctggcaacgccttggttttgccccagtgatactgatttcagacttctggccttcagaattgtgaaagagtaaattgtggaagaatccatttcttttgttttaagccaccttatctgtagtaattttgtacaacagcctccggaaactaaaacacatacgcccagaaatgtgcccaagtctgtctggccccagtagctctgctgtttgctctgtactgtggagccatgcaggaggaaacaaatgctacccccaatgttctgcactaatagagatggagtgggcatgggaacccacataggaccattatttggcttgtgaacattgtgtactttttttttaattatgaagatttattttgctacatgtggagcctgaaaaatgccccttggttcaggcttctgagtaaccaagtgttgacctagtgggcccatagtggctggatactgaggaggggtgatgggcagggacaacttaggatgaggggtgtgctacagatgacccccagatgggacaatcatgttgatgtgaaagtgatattgtcagataggctaacagattctaagtagtatcagaagctgccaggttagcttgccactctgtcatcgatttagctggtaggaacacatcgagcccatatagattaagatgacttattacttacacagacaacaatggtattgctccccatggcccttgatcacaggatgacactggaacagaaggggccaagtgacatgcaacagaggtgatgggtccctgatgctgaggagccaattatatgctgcagcaaagcagctttacagcctgcagctgtaccctgaggggaggaggggaagtggacaggcccgcttcatcagaaccagcaaggcagatgagaaatggccatgacagtcttcctgtagatagagaggtgggtgagagatggccttgtggcagctcctggcaagctcacctgacttctcatgatctgggtgaccatggggtatccctccaagacttaggtcagcagtggttaagccttgccctgtagcctaggtaaaaatgtgcaaggttgtcagggcaccagcatggaggagttcccctacaaatatgagcccttcagagtgaaaaggcaagaacttagattttgccacttctttgagtcttcatttttgtatgaagactcgtgtgtgtgtgtgtgtgtgtgtgtgtgtgtgtgtgtataacagggtcttgctctgttgccaggttggagtgcagtggtgcaatcacagcttactgcagcctcaacctcccacgctcaggtaatcctcccacctcagcctcccaagtagctgggactacaggcgcacaccaccatgcctggtgaattttttaatttttttgtagagatatcgtctcactatgttgcctgggctggtctcaaattttcaggctcaagctatcctttcgcctcagcctcctgaagtgctgggattacagcagtgagctactacacctggtcccattttaaccatttttaagtgtaggttcagtggcataaagtacattcaacattgttgtgcaaccatcatcaccatccatctccagaacttttccccttccccagttgaaactctgtaccttttaaacaatgactccctgtgcccttcccttagctcctggcaaccatcattccactcactttctgttgctgagtacgttttttactgcaagctcagtactaacccctgcctccttgatattgctctgctttgtatatgagttgaatccttgaaggttgaatatgcacatgacacagttcatctacatgccttggtctcagcatgttctctttgactagaagagtctttaacagcacagccatgccttctgtttctctgaatcccacattccgaatgtcctgccatgctgttggtatagacaagatgtctgttcattgtgagttcttggtacctgatggtgaagttgggtagggcacagactttgctgaattcccatgaggtatctgagtccaaggctttagagcaggtcataccacagggaagggactttcccaagcaaattgctggttttccaccaaatccatgaggccgagcatgtggtcagttcccctgaaactttcatcttgattgcattctagatgacatgcccagcttgcttacattctccagccatgtcaggtatggccatgtgactaggttttgacaatggaactggagcggaagtgtcctgggactcaagctgaagacactggaccagtgtcttccactacttcctcctccttctagctggaactttgacacaacatcctaagttggggatcacaacaatgtgctagaggattgcagggccaccctcctcccaacctgggactctggatgacttcatggaacaagcctgcctacttccctggactgttatgtgagaggaagataatgctctgtcttgtataagccatttcatttcggggctagcctttgccctaactattacaaccacagagaaggctgagatagaacctggacctcctgactcccaggccatccctacaccatagtacaaggggtattagattggaggagaaagagaagtgagtgtggcaaagctatcttcagtggcagcaggagaaatgcctctgctcttgcctgaaggtactttctgtctgggcctcagccttaacatctcactcctggttgtttgcagtggcttcctacttggttttcctatttccagcctttcttatgctggctaaccctccttaccataatcagaacagtctttccaatacctatgtggtctctggaacagacatttcatccagtagccattcctttccattgtttcccttcttggaagagcctatcttccaagacagatggtgaaatattagtaatttgttctccagtgtcccttgcagcaaggattggccatgtagccaatgggacacattgacattgttgtatatggtaatttttatgtttaattttttaggtatttccaaagtggctctaccattttacattcccactagtgatgaatgagggttccaatttctccacatcctccccaacacttgttattgtttctcttttattatagccatcctattaggtgtctagccaatgagaactgtgggaacgtctgtcagaggactttggggaaagattttcctccttaacaaagagatatatggaacaaagacatcacaagaaaagaaaactgcagacaaatatcccttatgaataaagatgcaaagattctcaacaaaatagcaaactgaatccagcaacacaaaaaaagactatacaccatgaccagaaatgcaaggatgatttaatatccaaaaatcaatccataaaatacataacatcaatagaataaggaaaaaccaaacgatcatctcaacagacacagaaaaagcatttgacaaaatctaacaccctttcataataaaaatgttcaacaaactaggaataaaaaagaatttcctcagcctgataaagaacatctattaaaaaaccaacagctaatataatatttaatgattaatgattgaggccaggtatggtggctctcgcctgtaatcccagcactttgggaggctgaggcaggtggactgcttgatctcaggagtttgagactagcctgggaaacatggtgaaaccacatctctaaaaaacatataaaaattagccaggtgtggtggtgtgtacctgcagtcccagctacttgggaggctgaggtgggagggtcatttaagtccaggaggcagagactgcagtgagccaatattgcaccattgcactccagcctgggtgacagagtgagaacctgtgtcaaaaataaataaataaataaataagtaaataaaaaagattgaatgctttgttcctaacatcaggaactagacaagaatgcccattattactatttctattcagcattgtactggaggctctggccaatgcaataaggtaataaaagaagctaaaaggcatccagatttaaaagggagaggtaaaaccatttctatatgcatatgacatgatcttgcatatagacgatactaaggaatacacaaaaaactattagagctaataaacaagctcagcaaagttgtaagatacaatataaatatacaaaaatatttgtatacctatataccagcaatgaataatctgaacatgaaattaaaaaccaaatctctttataatactattgaaaataataaaataattagatataaatttaacaaaagaaatgcaagacttgtacactgaaaactacaaaacattgctggaaaacatgaaaatgtataaataaatgtagacatatactatgttcatggattagaagacctaatattttttaaatgacaacactcttcaaactgatctaaacattcaataaaatctttatcaaaatccgaatggcatttttagcagaaatggaaaaacaaattctaaaatggcagtagcttcttgttcagggctccttgttagtgagataatcttcctgtcttcactgatcctcctgaccttcacctgatgctgtcctatgtgggaaaatggaacactggaaagccaacacatttttttttctttgtctctggacttcactatcctagtaagtgaacaaagtcttgactattaatttcatttggcttattgtcctaactgaccatctcaacacctgtcatcttgacaatcttaaattattaaatataacaatcaaaagacagattggcagggtatatatgttgtttatgataaactcatttcaaattcaacaatttaggtggctgaaagtaagcgatataataagatatattatgcaaattttagtttaaaaaatagaagtggctaaatgaatatcagatacagtggacttcagaaccatgaaatttactagagtcaaagagggatattacataagaataaaaggatcaatccactaggaagacaaaacaatattaaatgtgcaggcaccaagcaacagagacttaaatatgtaaagccaaagctaataaaactgaaaggagaaatagacaagtccacaattacagtcaggggcataaacaacccaatctcaacaatcaattgaactactaggtagaaaatcagtgaggatttagaggatctgaacaacaccattaaacaacggtatctaataggcatgtataaaatactccaaccaacaacacagaatataattagtttcaagaacccaagaagtatataccaacatagacatatcctggaccatgaaagaaacctcagcaaatttaaaagaattataattatagagtatgttctctgacaaaaatggaataagcctacaaatcaatagcataaaggcagaaaatctctaaacatgtggaaagtaaacaacatacttctaaataatctatggctcaaagaagaagtttaaagggaaatttaaaaactacataaaaccaaataaaagtaaaaatacaagatatcaaaatatgtgggatgcagcaaaagtaatgctgagaggaaaatttatagcactaaatgcttaactagaaaagatgaaaggtctcaaattagcaatttaagttagtacctctagaaactagaaaaacaagagcaacataaattcaaaactagcataaggaaagaaacagtaaaattcagggcagatataaataaaatcaaaaacagaaaaactagaaaaactgcaaaaaagctgatttattaaaaaataaataaaattgataagcctctagcaagatggaaaacaaaaagaagatacaaatcactagtaccacaaagaaacagggaatgccaatatagatcttgtagcctttaaaaagataataaggaaatactgtaaatacattgatgctcataaatttgataacttagaagaaatgaaacaattcctaaaaaataaaaaaaaacttccaaaacccaaccaggatgaaacagatagtttggtcagtcctaaaatcattaaaatggccaggcacggtggttcatgcctgtaatcccagcactttgggaggctgaggctggtggatcacctgaggtcaggagtttgagaccagcctggccaacctggtgaaaccctgtctctactaaaaattcaaaaattagctgggcatggtggcagatgcctgtaatcccactactcaggaggctgaggtaggagaatcacttgaacctgggaggtggaggttgggagccaagatcgtgccattacactccagcctgggtgacaaagcgagactctgtctcaaaaaaaaaaaaaattcattaaaataactgaattcataattaaaatgctccaagctggataattctaccaaacatttgaaaaacacaacaccaattttacacaatctcctccaaaaaatagaagcagaggaaacacttctcaattcatttcatgaggccaatattatgagacgaaataaaaagaaagaaaattacagaccagtatctcttattaattctgatgcaaaaatccttgacaaaatataagcaagccaaatccaacaatgcataaaaataattattcaccattatcaagttagatttattacagctatggtagttcaacattcaaaaatcaatcaatccaccatatcaacaagccaaggaaagaaaagcatataatcatatgaattgatgcaaaaagaaagcatttgacaaaatccaaaactcattaagtctcccagcaagtcataaatagtgcaaaattatttcaacttgataaagaacatgtaaaacaattatacaaaacaaaaaaatccacagctaatatacgtaatggtgaaagactgctttcctcttatgatgctttcctaatggcgctttcctcctaagacggaaacaaggatgttctgcctcaccgctgttattctacacgatactggaaggtctagcccctgcaacaagggaagaaaaagaaataaaatgccccacgtcacaaaggaagacagaaaactgtactatttataggtaacctgtttgactatgtagaaaatctagaggaatttaaaatgcaacaaacaaactccaactaaaaagtgagtttacaaggtcataagacactagataaacacacaaacatcagtgacatttctatacactagcagtgaatctatggaacaaaactttaaaccacaataccacttataatctctccaaagaaaatgaaatatttagcaaaacatgcatagcatatgtatgctgaaaattataaaataccagataaaagaaataaaagatataaataagtaaatgaaaatacatactgtgtttacagattggaagtctcaacatagtaaagatatcagttttccccaaatttatctgtaggttcaatgttcatatcaaaatcccagcaagattttttgtagatatagataagtttattttccaatttataaggacaggtatagtctctagaatagctaaaataacctcaacaaagaggaataaagtggaaggaatcaatctactcaatattaaggtttactttatagctacaataatcaatacagcttggtagtttcttataaaactaaacatgcaactacgatatgatctagcaactgcactcttgagcatttcagagaattgaaaacatgttcactcgaaaatctgtacacctatgttcacggtagctttattcataggaactaataactagaaacaacccagaagtctttcagtgggtgaatagttcagcaagctgcagtatatatatgtcattaaacactccttagcaataaaaagcaatgaactgttggtatgtgcaacaacttggatgaatctgcaaggaattatgctgcgtgaacaaaagccaactgcaaaaggttacatactgtaggattccattaatatttactccacaaatatttatttttgcaataataaaaattttaaaatggagatcagattagttagtggttgtcagcgcttaaggatgggtagggagtggctgaaggaagaaaacgggatgcttatgaaaggataaagtctttgatatctttgtgatgatgaaggtatctatcgtgattacagtggtgaatacacacacctatgcctgtgataaaatttgcatagaactaaatacacaccacacacacacgagtacacgtaaaagtgggaaaatctgaataagatgggtggattctatcaatgaaaatatcctggtcatgatattatactacagttttgcaaaacgttatcattgggggaaactaggtaaagggcatatatgggatgtgtctgtattatttcttggagtctgtaattatttcaataaatattttaattaaaaaaagaagcaaaatacatctgcctactttctgatccagtaaatctgcttctagaaatatattgaatggaaatatttgcatgagacagggcaatggaggtggggggaagggttagattccaatcagtgttgaagctggagccaccaggacttgccaaggaattgagagtatccccgtgtctctgacccagtctcctcacggtttcccggcttcactctgccacatctaatccatttgccatcgtgtagctgagatgatcttctacaaattcaccctgaccatgcacctccctgtagagccttctatggtcccccactgccctcaaaagccagcattcttttccctggcataggagatactttgatctggcctctctgactcatgctcagtcctgtcctgcagctcccctgactcattgcattccctcttgacacgaagcctgtgcagatgctgttccctcagcctggaagacctcagtctgggtgactcatgctcacgctttaagtccctggtcagacagcacttcttccgggaagccagcctgaccttctcagcagggttctaagacccatatttcctgcctaatcacagccttttgcaaaagtgggtggtagttgtctcctcactggctaggcacacagtaggggctcagagtgtgattcctccaagtagaggggctccctgttgcctcaggactaagtccagattctgcaccatgttcaggagatcctgtagcgtctggcctctcctgacctcccagccctggatctagcccccatctctccacaactttctttattcagcctgttggcttttaatagttcttctaactctcctcatggtcttctctcaaggcctttgttgatgctgtcttctctgcccagacatgcctccttcttcccattttcacctgggtacctccaactcatccttcccacttcagttaaaacatcacctcctccaggaggtttccctgactgctggggccaggtgaaggcctctgttatgacctttcccatggtactctgtgcctcctcccttccaatgcacatcgtactttcatttattattttttgcctgtaattacaccggaatgtgaaccccatgagggcagagcaatttatgtcttgctcactgctgaatagtgcctggcacctagtaggagctcaggacatgtttgttgaataaatgattaatatccctcctgagagacaaatgcaggcatgtggcttgcccagttgaccaggggcctttgtgaagggaacagcaattctgggcaccaactgcatgacaggtactctcgagaccccacttattcctcaccatagccccttgtgataagtttatcatccttattctacagatgggtaaactgagctccaagaggtgaaataacatctgtagaatcactgctggtaagtggggagtcaggatttgaacccaactctctggcctttgaaattggtttcttactacaaaaaagcactgcctcttggtggtaagaaaccaactggtttttccagatgaccctgggagctaagaaaaccaatgcttcttgcatgcccgttctgcgccagacactgacatgctcatcttgctcaggctcaccacagcgctgtgcggtgggaattagaggaggagcctgaagccctgagaagcaaagccacttaccgagatcacatagctgagaagagctgagccaggatttaccccagggtgttctgactccaaggctggtgggctcaggcagggtggctacacattggtgccacctcccacttcctggacataccagaatgatgacaagaggcactggaagctcccacctaggcctgcagggttactacagaaaaagacaaagatcctttgagtcatctgggtgagaaaaggcagggaatgacaggcacagtgtggtgtgctagtgatggcctgtgcacagatggggctttgccagtccctttgcagggtggagataactgaacctggagagagtatggatttgaaaccctgtccccagcttgcacagggctgcaaatcacagggttatacgtgtttcctgccttcctggtgtgaaagtggctgaagagattgtgaggccagcctcagttttcccatcccagaaggggaagatgcccttagaagttgcccctgcccttctggagaccctcttgagactgcaagattggcctcaaggaagaggtcatcaggtctttgccaattggtccctggggcccagagaggggcagaaactagcccaaagtcacacagggatgcttggctgacccagaattggggcaggctttggaatccccacccagtgctctttttgctgcctcaggctgcacttatgctacccccttccacttggaaagccaaggagatgaacaagaagccactgagtctaggggtgatggtggaggatgtgctggaggctgggaaagagagtagtgaggatgctgccagggagctgaggagccagggaggggagggctgtcttagttatgtcaggttggggtctgccacgcacctgtcatctcagtctcatgctctcatcttgaaggaacagcacccagattttcctttagggagtcccctcccaactgcccctaagtccactccccatccccagcttcaaggctcagcccatcagtaaacttcatctccctggctacagtgattggtttaggcagcgtcatatgactccatttgagcaatgagaggcagctctgggattgttgctggaacctctgtgaaagcagaggaagctggaaaggatgtaatacagtagctgctgatgatcatcttgccaccataggggtaagtcatctggcaaagaggtcaagataatgctagcagggttgagagcctgaggcaaggacagatccctgaggacactgtctggacgtctgacaatgggtcatcctggctgccctctttcctagcctgcagcacatcctccaccatcagccctacatcctgttactcaggcacccaaccatgccggaacagctatggaatttccagttttgtgaaccaatatactctccctttggttaaggcagtttgagttgtgtttccatcatttgcaattaaaagattcctgctacaaagccctcatggatctgcattttttctcccaggtctcttctaccactagagagttgtggactcttggcaaaggagttaataacactactcacaattcatgtcttcattcaataaatattattctttacttcatatgttccacgctctggttgttttgtggggagcaaaagagaagttcccatttctgtttatgttagaaacaaaacaagacaaaaaacaaattaacaagcaaatacatactgattataaaataatgtgatgtgaagaaaaaaactgctaagaaagaataatgaggtaggagggggctacttgagatcaggtggtcacgctgagagttgagagtggaaaggagcagctgggaaggtgtctgggagaaggctgttctaggaggcagaaacaacatgaaccagaagcttgaggaaagactgttcactagaggaacagaaggaaaaccagggaggctggacaagaacagggatgggaagctgactagagtgtagagagaaaactaggaagacctcatagggccttgtgggtttgagtgtaattcaaccaaagaagccactgttcttgcctcctctctcatagaaagagaactcctgatttacttatttttattatttttttaaacggttaacttttattttagatacaggggctacatgtacagatttgttacatgggtatatggcatgatgctgaggtttggggtatggttcccatcatctgggtagtaagcatatagttttttcacccacgccccttccttatttctctccaccagtagtccgctgtgtctactggagtgtctgttgttgccatgtttatgttcatgtgtgttgttcccatgtttatgtctgtgtgtgttgttcccaatgtttaactcccacttataagtgagaacatgtggtatctggttttctgttcttgcattaatttgcttaggattatggcctccagatgcatgcatattgctgcaaaggacacgatttcatcctattttatggctgcatagtattccatggtgtatatgtatcaagttttctttatataatccactactgatggcacctaggttgattccatgtctttgttactgtgaatagtgtggaaataaagatatgagtgcatgtgtccttttgatagaatgatttattttccttcaggtatatacccagtaatgggattgctgggttaaatggtagctccgtttgtagttctttgagaaatctccaaactgctttccacagtggctgaactaatttacatttccacaaatgtaacagaaaggcccaaaattaacagtagataagactttatttctctcagggagaaaaaaaagtcaacgtataaagcaactctttataagggttctcttttctttgcagcctcgccggcatctgttgtttctgacttttaataatagcaattctgactggtgtgagacggtatctcactgtggttttggtttgcatttctctgatgattggtgatgatgaatatttttttcaagtgtttgttggccacttgtattatcttcttttgagaagtgtctgctcatgttctttgtccattttttaatggggttattgtttttctctcatttatttgtttgagatccttatggattctgggtattagacctttgttggatgcagagtttatgagtattttctcccattctgtagattatctgttcattctgttgagaatttcctttgctgtgcaggagctctgtggtttaattaggtcccatttttcaatttttgtttttgttgcaattgcttttggggactcagccaaaacttttttgtgaaggccaatgtcaagaagggtacttcctaggttttcttccaggattattatagtttgaagtcttacatttaaacctttaatccatcttgagttaattattgtatatggtgaaaggtaatggtccagttttattcttctgcatatagctagccagttatccatcccagtacaatttattgaatagtgagtcctttccccattgcttgttttcgccttgtcaaagatcagatggtttatagggtgtggctttatctctgggttttctattctgagaacccctgatttatatttaggcacagaggacctctgattatggataccatttcccagactctcttgcagctaggtgtgccatatgagtagatactggtcactggaatgtgaacaagtgtgaaatgagtaacatcagggtccttcctgtaaagagcagagaaatacccactttgtcctcttttctccctagaatagctggcatgcagggatgagccagagccatctcagactgtggcaggagggcaacaccttaggaatggctgagcaacaagccagacagagcctgagctcccaacagtttcatggaagagatgcttcataggttgactttttttctccctgagagaaataaagtcttatctactgttaattttgggcctttctgttaatgcagctgaaattatatagagatgtttaaaactatgggttaggatgagaccacccaggacagtagtcctcaaactgtgttttcgggagctctgagaactctgagtgtcattgagatgctatcaggggtctgtgaggtcaaaactcttttcctaataatgctaagatgtgtgtaccttttacactctcattctctcaccagtgtatggtgcagctttccaggagctatgtgcatgggatagtgcaacacggtgtatgcagatgtgtatgcagaagtagtatgaaaatccagctgtctttttttaaagccagacaatgcagggattcacaaaaatgtaaaacaatgtactcttcttacgaaatgccttttgtttggaaatatggtcagttttgaaaacagattatatttatgttaacatgtaatgcattcacaattttaaaattaatatttttaacttttctccattttactaacataaatattaatagatacaaacccacttaaaaagctctttcagatcttcaagaatgtttaagcatacaaagaagccccgagaccacaagggtgagaactaccatcctccccgctctccggatgctcccacagcctgggctccccagtgcaggtagggactccccagagcatgagaccacccctgcctctcttggccccatgacccccctcttacctaactgttccttcacccccagagccagcaccaagcaggagatgcagtacagtgtgcccaggaccatggcagccatcacatatgccctccactggggaacaagaagtgcgttaggctgatgtactccactccacctccatacgtgtttgtgcagtgacaccagcctggagggccttctatcgccatctccctcctctgtaaatcctacccactctttgagtcttggcccaagggctgctgtctctctctctctcaaatgatttctgtgttctcatttgtctctgccttctctgggaatctttggtgccacagggtaatctcctgtgtgtcactcctgacttcctaattcatctgccatctccttccttgaaagcggaaatagtgacttcttctgcttccctacattgcctaataacaataacaactaccataataatacttgctaacaattattaaacagtcaccattataatattagctcatttactccttgcaacagctctctaaggtgggctctatgatattagcctcattttacagatgagaggactgaggctcagaaaggttaaagaactgcccaagccacacagttcagaaatggaggccagcatataagccagttcaactctgattggcgactgctagaaatcaatggagtgatatgcacttagcactgtgccggggggatagaaagtgctctactacccagtaagcatttattgagcacctactatgtgtcaggcactgctaggtgctgtgggttcagctgtgagccaagcaaagtcccttctctcctcgtgcttgtaggctgttcctgcctaagccttccctctgctgttccctcagcttgaaatgttttccccaggttcccacatggcttgctccatcacctcctttaggtctctgctcaaatatcaccttatcagtgaggcttcctctgacctcaccacctaaaatctcaacttgctctgcccttccctgcagcacatcctgcccgatgcctgcatgtgctatgggcctcactcactcatgggtaatatctgtttcccctgcaggacgtcagctctgtgagggtggaagatgtgtctgtcttttccctgctatagcctctggcacagcatagcacctggtatacagtagatgctcagaaaccatgtgccaaatggatgaatgagcatggttggtggtgaaaattgttatgaggaagaatgaaggtagtcaaaggggatggggtctgggggtcatcttccagagagggcgtaagattggagacctgattagagcgtgtggtgggggggagtggggtcggggggaatgtgtcatgtaaagaactgggagaagtgtcttccaggcagaggaaaagcatgtgcaaaggccctgtggtgggagcatgcaaggcatgtctgagaaacagaaaagaggctggtgtaagggagaagggtgggaggtgagggagaagggccgggggccagcttgtccaggtctttcagaccatgctgagggatctgacgtttcctgagggtgatggggagccatggaggagtctacagacattagctgttattactatgtttcaagggcccacatgggccaggcccaggtaggccgccttacacacacacactcccatttgatctgtgtgtccatgctgcaggctttcctgtccccttttcacagacagggaagcagaagccagcaggcccctctttactgtgttctccagagagttggtgagcaggaagttgctgttgccatcaagggagccattgtcccatgagccattgaactccacggagccctagtttatgctgctgtggaagtggctccccagctttccctagatgtgggctcctactagcatgctgacagcttccatacctatgcctgcggaggcgacttaggagaccagcggacttacttcctggtcccaggatgaagtaaagaagccagcagatggtgccaaaggcaacctctatttacccttgctgctcattagcataagacactcccaccagtgccgtgacagtttacaaatgccatggcaacgagctgcaagttaccacccctttccatggcaacaactcggcatttgttcttttctagagcattctgaataacaaacctcttaatttgcatgtaattaaaaacttttgggtctggtaaagatcttaaatgtttttagcacacacacacacacaaatgtaagtgggtgaggtgacagatgtgttaactaacacgattgtggcactcatttcacaatgtatatgtatatcaaatcagcatgttgcacaccataaatttacacaattttgtcaatcatacctcaagaaagctgggaaaacagaatcataccacaaattcactgttttagaacatgcaattaagcagttttagtatatttacagaactgtgcaaccattatcactactaattctagcatattttaatcatcccaaaaagaaaccctgtacccattagtagttactccccaatcctctctccctctagtgtgtggcaacaagttgtagcatgtatcactacttcatttctttttatggccaaataacattccattgtgtggttacaccacattttgcttatccatttatcaactgatgcacatttggattgtttctaccttttggctattgggaacagtgctgctgtgaacagcctgtgtacgtttttgtctgaacacttgttttcaattccttggtcatatacctaggagtagaattgctggatcctatggtaactctgttatcataactttttgaggaactgccaaactgttttccaaaagggctgcaccattttacattcccactttcagtgcaggagggtcctaatttctctacattttcaccaacacttgttgtctatcttttttatcatagctatcctaatgagcgcaaagtggtgtctccatgtggttttcctttgcatttaaagattactaatgaatcagtctggcgtggtggtgtgcgcctgtagtcccagctacttgggaagctgaggcacaagaatcactggaacctgggaggcggaggttgcagtgagctgagatcttgccactgcactccagcctgggcaacagagcaagactctgtctaaaaaaaaagaaaaggaatttagtactactaataagcacattttcatgctgatttgtttgttttaaagatgccaaagatctagatgggtttttatgtgtgaaattttctgattttaaaatgttggtcccagatcatggggtgttcagagcagcaggctcccatgctggagggccacaccaccccctggccaggcctgctcagcattggcttatgtttggcccatgtttgccaaccacctccttcagttccctgttgttccctccatgtcagtcactttgaatttctcccattcctcacacatagcaagttcttttccaccccagggcctctgcacttgctgttctttctgccaagcacactttctccccaaatctctgcttggttggtttttcatgttgcaggtctcagctcaaatgtcaactcctcagggttgcgatccctggctaccctaacatagccccaaaatttgctgctagtaactgtcccatttctatttcattgtcttcagagaactattggcatctgaaattaccttgctgtgtatttatttacagctgtccttagttatacacagaggattatttccaggacctcttgtatatacacaaattcacatgtactcaagtcctttagtgtttattggagtccacggatactatatttctttctttcctcttttttttttttttaagagagagggtcttgctttgttgcccaggctagagtgcagtggcatgatcacagctcactgcagccttgaactcctggattcaagcgatcctcccacctcatccatccaagtagctgggattacagacatgagccacagtgcctgactcagatactttattttttatttacatttggttgaaataaatttgcctataagtggaatcacatagttcaaacacgtgttgtttaagggtcaactgtgttcatttactatctatcccactaagatataaactgtaagagcagaaatcatgtctcttattccctgctataacttccgtaccctgcacctagcaggtgcttaatacatgtttgatgaatgagtaaataagctacaaatgaggaaaatgaggctttgagatgttaagtcacttgcccaaggtcccacagttaattagtggaagagccacaacaggaaaggttttctatgtgcagatcctgcagcccaggaaggagagacttgcctgagtctaatagcaagtcagcaagaaaacaaaggccgccaaggtctttccatgggctgctgaatgaggttggcactgggtgcctgtcaagctccaggggcctgtctgcagtcggtctcagctgagggagaccctccacctccagggactcagtcaacaagacctggctcctctagaagcctccatagatgaagggccccctggaaatccccagagagatttctggaggccagaggtaggaggacaattcagcatccagaggagaaaggattttctaacaggcagagcagcagtgatggaaggacaggtggcaaactccccattgcctgagggagataagcggagatgagtatcaggaggggaccagctccactcagctctgccacatgttacactcaggaaagaggctgggggagcactggcaaaactcaggagaggaagaggcaccagtgcccagtctagtgcacgtgacatttgactgaatcagtgggactggtgggagcaatgataatgcagctttattttgacatcccagtgtccacacaccctgatgggtgaactggaatcttcacaggcactgagatggaatctagggcaggtcccagtgactctggtaattgaaagtcttcctgtcactttttcccctcaaagagcttcaattcatctattcataaaaataaatttctgcaatgataaaaatgtaccagaagcaagtcaaaagacaaaaaacagaataggaaaaaaaattgtgattcatatctcaaagtgtatgtctccctgattctgagacattagtttcctatacataagtgaacagaggatataaatagaggttcacagaaaagaggatgcaatggcttctgactgcacgaaaagatactcaacatccttcataatcagggaaatgttaaggcaaactatgatggggtcagatctagttctgggcaagatggagtaataagcatgttccaccccacctctcctgctgaaggcagctataaaacctggacaggatgcacaggccagctatgtgaggactctgaaaagtaaatggtagaaggtaacttgaagaagatcagaaatcaaagtaccatcctgagtttacctttttgcccccttcttgtttcctggctagaacaaaatgtagcctggaagtggggactgggaccacacaggaaaactccagtagaagccctctagtgctggcttaaggaccaggaatttctaatgccactctcctgccctgagtttctttcttcttcctgctctcctatgccccagccaccagggagtccctggcaggaatgacagaggcctcaaagcattgggaacctgcaggagctgaaactcagagggaggagaatgttcttcatgcatcagcagagttgtgatcccaaaaggaagggagcaaacccctgttgctttttcttctttgtgctcccaccacctggccctgccatgaagagtgcagcacagcgggatgctgcagctttagctttctggctgggagcgtgaaaagggagccccaggaaacaggaaagtaccagggagattgtaaaaagggaggagcttgtgaaagcaaccccattacattgtttacgaactccttgaggcactctccaattgcacatgtgtggatctgattgtaatcaccatataaaggctctgagaaatgtgctaacaggccacatgctcaggtcccagactccctgctgggtagtgcacacagggtaccagacagtcagcaaaggctttgcagactgagctgacattggaaccaccacacacagaaggttgggacttgaggcctgaacctgaccaggttgactgccagccaaaacacaagatataaatgtttcccatagaacttaaataagacccagagcctcaaaatataatacagaaaacgttcaggttacaatcccaaactactcagcttgtgaagatccaggaaaatgtcaactctcctgggagaagacatcaacagatgcccactcctagatgacacagatgttggggttatctgataccttttgaagaaattactacaaaaatactcaaatgagtaagggtagatattctctttttcttgagataaaattcaagtaacaggccgggcgcggtggctcacgcctgttatcccagcactttgggaggccgaggcgggtggatcatgaggtcaggagttcaagaccagcctggccaagatagtgaaaccccgtctctactaaaaatacaaaaaattagccgggcgcagtggcaggtgcctgtaatcccagctacttgggaggctgaggcaggagaatcgcttgaacttggagggtggaggttgcagtgagccaagatcgcaccactgcactctagcctgggtgacagagtgagactccgtcacacacacacaaaaaaatcaagtaacataaaattaatcattttaacagggcgtttagtatgttcaatgttgtgtaaccagtacctctatctagttctaaatattttcgtcaacccaaaataaagcctagtatccattaagcagtacttcccattgtcccttccacacagcacccagcaaccatcaatcagctttctctctctatggatttacctattctggatattttatataacatgtagctgtcatagtatgtgactcttgtgtctgagttttcacttagcataatggttttgaggttacctagagttagccaaactgcaggtaacctcaaaaacattgtgctaaggtagggtcttccagaccaccaaatttgactcccaagactctgacacaaatttcaagttcaaggggttcctaaaaccaccctcaggttgtataattcaccagaaagactcgctgaaacctattatatgtacgtctatgtttattacaacaaaaatatacaaattagaaccagccagaggaagagatgcataggatggagttgggaggggtctaaatggggagtgtccggtgtcctctccccagggtcatggacagttacttcctcgtgaccatgatgtgtgataacatgcacagagtattgccaaccagggaagctcacctgaactttggtatctagagtttttaatgaggcttcactacatgggcatgattgattaaactcaatcttcagcccactccaccccaaccctggaggttgggttgaaagctctcacagtaaattctatgtttggtttttctggtgtggccagcccctccaccctaagactatcaggtgtgagtggcgttatgaataatctcatcaacataaactatcaggtgtggtcccagtgactcaacaggaataaagaggacactcctgtcatgttggaaattctagacatttctttgagtgaggccaaattccttacaacatggaagtttatccattatagcatttatcaatacttcattacttttttgtttctgaataatccattttatgtgtacacgatttgtttattcacttgtttattgctggacatttgggttgtttccacctttggggtattttgaataatgctgctattaaacatggatgtacaagtatctgagtacctgttttcaattcttttgaatatatatctgggatgtttaactttatgcattaatttgactggattatgggatacccagatctatggtaaaacgttatttcagagtgtgtctgtgagggtgttttctagattagtatttgaatcagtggatggagtaaagaagatcatcctccccagtgtgggcagacatcatggatgaacttcggtgttgaaggcccattaaaatagaacaaaaatgtggaggaagtgcaaattctctctctttttcagctggatcaccttctcctgctctcagacaatggagctcttggttctcaggcttttggactctaaggcttatatcaatagcctcccacccccagattctcagaccttaggccttggagtgggagttacaccactggcttccctgattctcaggctctcagacttcaactgaattacatcaccatctttcctggttcttcagcttgtaaatagtatgtcatgggacttcttggcctctgtaattgcatgaaacaattcccataataaatcttctctatatgtattgcattggttctgtttctctggagaactctgactaatataattcctaagagtggaatttctgggtcatatgtaattctatgtttagctttttgaggagccaccaaattgttttccacagcaacttccaacagtgacaagggtttcttttttcttttataggttcagtattctttattataaacaatcagacaacagtgtaagtgtgcatttgatggataaccgaagccaagttattataatagaaagcatgacttcgctcaaatagagtttctttgttgttgttgatctgttttacattaatttgaatttaacatatgctaggatcacctaaatttgtcatacagttctgctattaaaattgtaacagggaaagacaaaatgtgaaatgcatgttatattttgctttatttgttgaatatctatctatctatctacactaaatatttgggacacattcagagttaagcaggtgcttaaagtctatcaagtgatatttataaaatgtttttgttgctgttatgggaacatccatatccttagaagccaataaaaaagaggattctaaatgctaggtggttggctaaatgttcctgatttatactgagtgtaaaacaaaataaaacaaaacataaggtatatgtgttaagtagtgacatctacatagttccaaagcactggcaactattaaaatatcatccagctaaaacaaacttttcacaattttttttaacagaaaaataataaaccaacaacaaaaactggtaaatgttctgggtcttgtgagcagaccaaaatgttactacagtgttctctattgtgtgatcccagtgtacaagtttctatttctccatatccttatcaacatttgctattttccatgtttttgattatagttatcctagcgggtgtgaagtggtttatctcttgcaggtgttaagtggtatcccactgtggttttcatttgcatttctttagtaacaaatgatgctgaacatgctttcatgtgcttattggccatttgtatgtcttctctggagatatgtctattcaggttctttgcctatttcttaatttttttttttttttttgtggttgagttttaagtgttctttatatattctggatacaagtccattatttgcaaatactttctctcattttgtgggctgtgtttctactttctagataatatattttattgtgcaaatggttttactttttatgaagtctaatttatccatttcttccttttgttgctcatgcttttggtgtcaaatctaagaatccattgccaagtctgaggttataaatatttactcctatgtttttctctaaatagtttacccctatgttttcctcttgtatttgggtcattgatccattttgagttaatttttgtgtatggagtgaggtacgggtccagcttcattcttttgcctgtgattatgcagttgccccggcactgtttgttgaagagactattctttccccattgagttgtgctgaacacttattgaaaatcaattagccatagatatttatttctaggctgtcaattatattccactggtgtatatgtctgtccttatgtcagtaccacactggtttgattatagaagtttggagcatgtttggaaatctggaagcatgagccctgaaactttgtgtttctttttctttcttttttggtgtgtttctttttcaatagtattttgactacttggggttcattccagttccacataaatttgaggattagtttttctatttccttaggaaatgccattggaattttgataggggttgcattgaatctgtggatcatttgcaattaatattccaatacatcaacatgtgttgtcttccatttatttaggtcttctttaatttctttcagcaatgttttgtagttttcagcatagaagtctttctccttggtttaagtattttactcttttggatgctgttataaatggaattgttacttaatttcattttcagactgttcattgctgatgcatagaaaatggactttcgtgcactgatcttgcaatctgcaactatgttgaatttgtttattggctctagtagttgtgtgcattttggtattgttatattttctatacatagaattatttcatcttcaaatagagataactttactgcttcctttccagtttggaggctgtttattgctttttcttgcctaactgctctggctaggacttccagtacaatatttaatagtagtggtaaaaatgggcattcttgtcttgttcctgctcagtggggaagcttctgctcttttaccattgagtataatgtgagttgtgggttttgtgtaagtgacctttatcatgttaaggaagttctctgtattctgatttgttggtgagtgtttgtatcctgaaagtgtttgaagtgttgaattttgttgcatgcatttaatgtatctattgtgatatcatttccctctttacagagttgtgttacattgatggatttttttttttcttatgttgagccacccttgcatttctgggagaaatcccacttggtcatgatctataatcctttgaatgtgctactggatttggtttgctattttgttgaggattttttgagtctatattcataagatataccggacagtcgttttgtctgcctttgatatcaaggtaacggtggactcatagaatcatacctttgatatcaaggtaacggtggactcatagatattctgcatttatatttttgtaatcacaatttgtaaagaattctcaaaatccaacagtaagaaaacaaataatccaataaacaaaaaggcaaggactctttttttttttttttttggagacggagtcttgcactctcacctaggctggagtgcagtggcaccatctcgcctcactgcaagctccgcctcctgggttcacgccattctcctgcctcagccctccaagtagctgggactacaggcacccgccaccacgcccggctaattttttgtatttttagtagagacgggttttcaccatgttagccaggatggtctcgatctcctgaccttgtgatctgcccacctcagcttcccaaagtgctgggattacaggcatgagccaccatgcctggccggcaaggactcttaaaaatgctttatcaaaaaggatttatgggtggcaaatggcatatgaaaagatgttcagcatcattagcatcacaagacatgctaatgtcaaaaccatgacaagagataactacacacctattaaaatgactaaaataaaaatgctgacaataccaagtgttggtgaagctaagtagcacccaaaaatctcatatattgctgacaggaatgtgcagtgcaacagccactctgggaaatgatttgacagttttaaataaagttaaacatacacttaccatataacccagccaccccagaccctagacatctctagagtattcaccctagagcagaggtccccaaaacctaggtcatgaaccagtatcagtccatggcctgttaggaaccagccgcacagaggaggtgagaggctggtgagtgagcaaagctttatctatatttatagccttgccccactgcttgccacctgaactccacctcctgtcagatcagatcagcagcagcattagattctcatagaagtgcaaaccctattgtgaactgtgcatgtaggggatctagactgtgtgcttctcatgagaatctaatgcctgatgatctgtcgctgtctcccaacaccccaagatgggaccatccagttgcaggaaaacaagctcagggctcccactgattctacattacggtgaattgtataattatttcattatatattacaatgtaataacaatagaaataaaatgcacaataaatgtaaatgtgcttgaatcatcccgaaaccatccgccctactccctaagtctgtggaaaaattgtcttccacgaaacctgtccctgatgccaaaaagattggggactgctgccctagagaaaggaaaattttgttcacagaaaaacctgtacatgaatgtttatagcagctctatttctaattgccccaaactggcaacaacccaaatatcctctaatggttgaacagatagacagattgttgcacattcatatcatggactattacttggcaatgaaaaaacaatgaactttccataagcacaacatatgaaaattgttcctccagatgaatctcagaggaattatgctaagaggccagtctccaaaggttaaatgctgtatgcttccatttacatgatgttctggaaaagacaaaaccacaatgatgaagaagagatcagtggctgtcagggattgggtttgaggggtagtgtgactatcaaggcattgcatgagggaggttctgggatgatggaattgttttgtgtcctgattgtagtggtggttacatgaatctatacgtgtgctgaaatctgtataattatatacaacatagttaattttactgtatgataattttaaaaattaaatgaattagaaaatggttaacagttaatactcactcatatggccaaatgtataacaactcttatgaggcagcagtctggcagaacttattttctggtcacaaccctgctgaccaaaacaggatgtggtctacacaaagtgaagaaaccgcaggaaccagcagatggtgaggaaagtgatccctagctgccctcattgctcattagcatatgacactcccacaagcaccatgacagtttacaaatgtcatggtaattacctggaagttaccacccctttcctaggaagttctaaataacctgtccctcagtttgcattggcttgccccttaatttgcatgtaattaaaaatgggtttatgtgagtatacagttgccaggagcccatatgttgctgactgaagtgcactgcctaggagttatccttgctctacaaagagcagtactgttcaacaaaagattgccaattccactggcttgtccttaaaagctaaggacccttctgggataagcaccaattttggggctcacctattctgtatcagttatactgacatacccattttgcagatgaagaaaaggaggcccagaggggctgttgggttgcccagggtctcagagctaataaatggcagagctgagaacctgatttgggcagtttgccctcatggtcattattcaaaatctcttcattaactgactcaactggggggcacaaggccaaatttttctgagttttcaggtagctggtgattgtttttgtttaagtctcctaggattttttttttttttttacaaattacatgtttttgtaatttgttacatgctgtaataagaactttaaaaaaagtagatttacaacagctgaatttcctaaaatacagggtgcttgatcataagactcttcaagaaaaagatattttagaacactaataaatacaatgcgaaaaaactgtattcttatctgggtccttctatcagtgaagccaaaagagctattacaagacaacttaaaactcattccaaagatgaaggcagttgtctgtacaatgcagtgcatcccaggcatctccaaaagacagtaatgagaatccaacccgacagtgaagggagccatgcccatcagggaagttggtgcaattggaaggaaggaaggaaagaagaggtgatccaatcagcatattttttctttgagaacatgaataacaatattcatcaatttctcatacccacaaaaatgttctaaaaaaaacagagaaagcaagttagaaaatccgcaaccatagcaagcagtatcctaaagaaacataattatgtgctcacatacctgaaaaatgaacaggttatattatatagattttaccaactcatcaaagattggccacatacgatgaagactttgaataccatcctgaagtaggaataactaaaatttgcatagatgttatgatcagatcattatgaataagatgctagtattcatcattccaggaaaccctaagctggaaacattcaacattcaagcctaagttggatattattcaacactttatgcacaagtaaatgttaagggaggcaatatgcagagtgattaagagtacaagctccgaaataaacatactaaggtcaaatttatcgccaggcacggtggctcacacctgtaatcccggcactctgggaggccgaggtgggcggatcacctgaggtcgggagtttgagactagcttgggcaacatggcaaaaccccatctctactaaaaaatacaaaaatcagctgggtgtggtggcacatgcctgtaatcccaactactcaggaggctgaggctggagaactgcctgaacctgggagatggaggttgcagtgagctgagatcatgacactgcactccagcctgggtgacagaataagactccgtctcaaaaaaaaaaaaaaaaaaaaaagaaaaaactaaggtaaatttatcataaaattgtggacttgcacatgctggctaggtggaataggcatgttgcttaacctctctcaccctcatatctaaaatagaattaaaaatggtacctgtcttatagggcttgcctgaggattaaatgggatgattcatgagaaatatgtagttaataatgtggtacagaaaaatactcaataaatagtattcatgggctgggcgcggttgctcatgcctgtaatttcagcactttggggggctgaggcgggtggactacctgaggtcaggactttgagaccaggctggccaacatggtgaaaccccctctctattaaaaatacaaaaattagctgggcgtggtggtgcgtgcttgtaatcttagctacttgggaggctgaggcagaagaatctcttgagtccaggaggcagaggttgcagtgagccaagatcgcaccactgccctccagcctgtgcaacagagtgagactctgtctcaaacaacaacaacaacaacaacaaaacaacaacaacaacaactggtattaatgcaaacaaaaccacactgtgaatccactgctcacttacctgacaggcaaatgctcacagcgcaccctgctggcgaatctgtgggaaaacaggctctcaagtccactgcgggtgcaagagtaaatagcacttacacatctgggaatttactctttacacatttgcatatacaagctttgccactgtagtactgtttgtaacagcaaaacccaggagacacccacatgtccttcacaacaaatgacctccaaaatctactgttaaatggaaaaagatgtagatagtggtgggcaggctgacacacttgtgaataagaatcgctgcagatctattggatctaagatgccaggagtgacaaagccaccattaatttatatgccactaagaaagaccattgctgattaaattggcacaatgcttagaattttatatttgagaactcatttagacttatttagacatgaatttatatcatatcaactttgggcacaaataaaaaggaaacatatagacaaaataaatatgttaaggtattaggtgacaccaggactgccttcttgtatgatgcattctgatttcagagttgctaaaatatgggaaacaatggatgcctcagaatagacagagagtatcggcttgtatttaggaactctgcaaggacaactaagaaacttatagtggggagggagggagggaggggaaattgggcaaatggcatggataagaagggaggtatctaagacattttttggcaccatgtaaatatattacctatttaaaagtaattttttttaaaaaggccattcccaggtcatagtcaagattttgaacttcatttagaagtacagcttcttccctctctcaggggcagggtcgcaggggacatggggaagggcctgctggtttcctgtggccggtgcagatgctctgggcttccctctagggtgcacttgttggttcttcagatcttggttcacttcccttgaggaagccaatagattctctagctggctgcttgtaactcctccctcagtcctgcaacccaaggtctatcttgcactaaggtccctctgtccttccagagcaagacccaggacagtccagtctggctgcctcatgggtccacatttggctgatgggacttatagcacaagctccttcacaccaagttctctttgcttcatcagcctcttgctttcaagattgctcaggtgtgaggtgggtgcctggcaccttcgtcatctccaagctcttgagtggtctccttgagacaccaatccctaggctgagggagaaggaaagctcccccttcccctgtgcactcaaagccctccagtaacttcctttaaagaaaactcttctcagagctccaacttgaacctttaacgtctttggtgtgggaaagaggcaaggagacacacagctagtttttgaccatgtctttgaaagccctgtgtgtggacagcaattcatcctgggaggtggagtagctaggccccctattgccttgggaacccagccaaattgggatggaaataattccatcttagtatattgtcacatggatgatcaaactaaggaacctgccgaggccacacagctagtacccagcaggctgactcctaagcctgagcttttcctgctgcaggtggttcacccagagctgacttaaaataagctcatggtacagaggccaggccaggaggatggagttagatggcccttggttcaaactcagttgtcatttattagtagtgtgtccttgactgctttctcctctctgattctccgatcatttaaccaatagacgtttaatggccaggttgtctaccacgtgcaaggcactcaatttcattctctgtaaagatgtgaataataaaagcacctgtttcacaggagtgttgagaattaatgagatcatgctcaagtgtttgacagcgcccggcacatggtaagggctacacagcagcacctattgtcattcataaagttcctcctatgcgtcaagggcttcacagacatctttaatccccatagtctaagaggtaggaactaccattatccctgttttctgaatgaggaagccaaggctcagagaagcttaggtgacttgtctaaggtcatgcctggtataagatggaacctaagttcaaagcctgccccaagcctccacatgccctctgagtttgtctcttgaggaaggacaacttttttgccttttcgtcagagaaccaacctttaatcacccttcacaacccagttcaagggtgtccgcttccgttttccctgtccctccctgcccgacccaatcgtccctcctgccactgcctttgtgcctgcctttttcacagcagtagagcctcggggtcaagggctgtggctctgcgttcaggtagttggggattcaaatgcctcttactccgtgtgtggcttcaggcaagtcccatcaccgctctaagcctcagtaacttcttccatagtgggctaaccatggtacccttgggttgttaaggcacaaacggcctggcacaaagtgagtgctcaaatgatggcagctgctattacgattagtagtagcaagtcctagtcctggcattgaggttctcagttgctcaacacggagggtaactggcccttaataaacctcttggtccagctgagacagggcaagaagggactggggacattcctgtcacacccgcttcctaccccagacacatcttcttagcacctgttgcaggaacaccctgtggctctaggtgccctttaggacgccccctcatggctgagaacctgctttgggaggagggactgcagttcccaagcaggcaccacatgggggtgctttaaaagccttcttgccttccatccttttagataaggtctggtctccatttcacaggttcatccaagcacgcacttgttgaggatctactatgcgtcagacaccatgccacctgctccggatacaagagtgaggaacaggcatttctgccctcatggagtttataagctagtggggggaccaaggaaacaagcacgttaataaatagagtacatattagatggagcagagagaagaaaaatgaagcaggtcaaagggatggagggtggtgggaaggggccagggcctatggggctctgcaggtcttagaagtttccaggggtaatggaaagctcccaaggacgttaaaggatgggagtggcaggctgtggttaatggtgccaaagaagccctttgcctgggtggggcaagggcagaagctgggggactgatgagattctgcagtcataggtgagtgactacggaggctggcccagatgatcgtaggggaggggtgaccaggggcacccagaggattgctgatggactggacatggcatgagatgaggccaccgaaacagagaggcacagtcacagtgcaggagctcagactgggacctgggtcagatgctacaagtcaaaaagtgttttctactctgcttccctgtcctggcctgggaagagtgtggcctggaagagggggactgggatccccagccacacaccctcaacacaggagcccaacgcccatttaaagaaggaaggccttttatttgggcctgggaatcaggagttggcagttctctctgaaatgctgggagttaggagacagggagcagcagggaacccttatttctgtaccagctgcttcccctgaatgagctctaagtcatctttaagctcctggcagggaagggcatgctttgtcctatggatgggtatgaaaagggccgctgcccctctggaagacactttggaacgccattaaagccatgcctagctcttgaccacatgcctgcttcttccctggccttctactgaggaagcagccggatctgtgcaagactctacctacagggttgctgggcatgattgttaacaagatcaaacaacccacatcccacagcaaagactagttaaaactgcacttttagaaagggcatcatgacaattactttgcctatttttcattttgatgagttttgggtatctatcaaggcatatccaatgaactgacatgcatccttgtcctggcccatttaatgccaggaggttctcttaccaaccagtttttggggagatccaaaatgccccagttgagaactgaattcagaagccccggaaccagtggctgagtatcctttttcttctaaacctgtgaaaacctatctgggtggatgggcctttccatctggactgcccaaaacagaaaactagggctgggaacatccttccccagcctggaaccagaccagtgtgatccctggtccaaggtcagagggactgtctctcaactgtggtggctgcatcaacaatataggtaagagttagatcacctgcctcgcttacttcccagaggtgctgggggccctgtgcaaactaccgtagatgatacaggttttaagtgggtgtttttacaatctcttctgcaatatactaattaattaagcagacactgtgagaaggaggtagggggaggtcaagtgtatgtatatgggcctggcagttagggatggagtgtatactgcactccatggtggctgaacgtgggctctggatgggaagaggcagtaccttaccacttactagcagtgtgactggggctcaaggttttgcactgtaaagtgggacctttgtgaagcacttaagtacttctgctggctgctgtagtttccgtcaaagcaacccattagaaagtacaaaactccattgtcctcattctggtttttaatggtcaaggtgacaacagtgtacagtttttccagacccatatgtaggttccataatctccacctgctggagaaaacaccgtgacagatgccattgccccagcaggccactgccggtgtgggaactttgggatcaaaagcaccaagccaagtcccttgctcaggatgggtcttggttgaaaccacaagcccttctgcagttctaggtggatgtagtgttggttcttggctcattgcaggggtgaagcaggaaagagaaagagactggtgaggcctgcttggaaagaggattgaggcacattacgattccaaaccaggagatcctgagtcagcactgattctgtctctggtttgtttaatacgggaaagggttccatccaagagcccaataggcctcctctcccaaacctgcatagcaatcaaacttataggggtggtggagggtctttaccaggctaggactactgcctatgtttctgcaagtcacaagtcagcaggtcaaagaacaagtgtgaagcagaacctgctaagcaaagccaagtagtgacactcacttccaaaacatacccagcagaagcctcctgcaagtaccaacagtgacaggtgcttgtagcacagaaaactcaccccttcttcaacagttgatttgatttgccacacatcactagtgaacagctcggtggcattttgactgtttatcttatagggcaagataccctgattctgaactcacttaggatgggttggcatgagctgtatcctagtgaaaaaaaatatcccacctacctcctaggtccactcaagacttctgcacgtggagtaaatcaagccataatggagcccctgagaatccccaggaggcgagcagtctggatggtaatggaggaaagggccaggcaggcaggtggaacagaatctcaactggccaagacctggcaagattagataccccaggggttgagtaaaaggagcacagggaaatatttattttcaccttctgaagacactgtgtgcatggagctctgacttcccacttcagggaactctggctgccgcccagttttatctgggcaagtgacatattctcgtgggaacaagtggtggcgaagcctctttctacacatttcccctccttcctccagtcatctgtggggctggcgggtgggacacactagtgaataagcattgtgtgccacaagtttttatgcagagaagatggaaggaagtttcctcccacaggccccaagataaatataattttaaagcaattaaagcctgcttcagtgggagagtttccgtacaacatgctggtgatattccttcaatttttttggttgtttttattttttttttcattaaagtccattgatcatcacaaaaacccaggaaatgcaactaaggagaaaacaaacgtccaaccaagatctaagaacccagagctatggaggagacgttgcactggactgctgggtgtgcacaagggggcaggaggggcgatccccatggggcatggccactggccatgggaaacacaggagggaggccaggcagctggctgggcggttatgttaaccgctgcacgatgacagcattgagcaggttggcttccttcagggtctggctctcatcagccagctctttgttcgggaaagtagtcatgaggataaagctggtggcagccatggctggccgggcatccacgatgaagagtcggatgtcgctgatcctgcaggagttggggaagcggtgagcagtgccatcctctgctgtccatacccctgccctgtggaaagctaaacacctcgcaaatcccctttcctgactttctccacagaacagcgaaagctacgctcaggcatgtgggaccaagtcccttccttgccaagagtccttcactgttgtttccattttccttgagataaacaccaacaaccctactgtgttcccaaggacctaattttataccaccctctttcccctcgttctcttctgcccgcttctagttcatcaggccatactctcttcccacatttgggtccttctttccagaggctcccctgcctgatcccctttctgtaatcctaatcacaactcaggcctcggatccaatgccacctcctcaggaaagccctccttagctccttggctccatccctggccctccttccacgtttctgggatgatctgattagtgtctcctcctgcagctcatgaatttcacaaggacagtgtgtgtctcttttgtatatcacaggaggcacttaaactatctgtcagaaattaatggtcaacttctcagggccaggaatcgtttctccagacactacctgccttctgaacctggagatcatatgacaatgaaaccacctggaaacaatgcctccttccctagagcacttaaacataagtttcctttttgccccaaacccctaaaatctatgcaacttacaatttggcacatctaagggcatggacctgcaggattctgcctgtgacttttagcaaaccaagctttttcacctagcaaagcctctgcatgggctgtccaccctgggaatgggcagcagtgtgctgagcttaatgagtgaaatgaaactgagacaaataactcacatcactgggatgggtcactcgcttaaccaccaggcacttgagtgtaatgaatgttcctgatgaaggaggtctcaataggctctagatgcacctggctcacagctggggcttgtctcccgctgtcacccacaggcgagcccagtcaatattcaacgactgacaaacaattcactgatcccacatgtgggtgctggcttagttggctcatgaccaataacatttagacacttctgttctacagaaaggaggcaccaaatatatttactggcaacagtcctctagcacctctcctactagtctcttcactttgctgtggctcagtttccccatctttaaaatgaagaaggcactgatccagcccagatggtctgagatgtggagcaggcattcccagaattctcgacagccagatctagaagagatcttcctggcccagtaattttcacaggccccttgtggggagggaggtggaggaagccaggtgagtgggacgctgacactgcacccccttctcctccatcaaccacagcagttctaatttgatgtcttcacaggactttagcatgggacttcctctgaagtctggtagcttaaaaaaagccctgagaaatctaatactctaattttacagatgaagaatgagacacacagggggaagtgaacagtcactggccacactaatggaagagtggggaccagaacttaaggcttcagacttgtagtccttaccaccctcgtgtctgctttggggaaagcatggagtgcctgctggtatttaggaggaagaacggctctctgcttcccacacatttgcgtgaggcccagaggacactcctagaataagctaggccacacaatgcaaggtacctgtggctgtggttaaatttctgcaccagcctcccgccgtctgcaagccgaatttggatgtttgtggtaggctctgattcgtcgattaagatggaagagctggctttggcttcattttctgcctgttgggctggagagctggtactcaacacctggggggcagtgctgaggagagaggatggcatcagaacacaagcagaaacaaggcccctagcaagaagggaatcccttcttggactgttactgagcatttgcaatgcgcctggcattgtttggtgctgctgatctattgacccagacagggaaaatcgtgcccttatggaacttacaggtccagcagaattcacttcaaaccctgagtcatatatttcatacgttattgctagctccctcgctcctgagtaatgtgggcaagttactcggcctttttcctccttggtgtcttcaactgaacaagggcttgaagggaggaaagcaggacagcctagggtgggagagacagggtcataaggctggaagacataatagaacagggtcagttttagcctcaatggagtggtggaggggagtgttccaagtctgcagctgaggcagccttggcacagcctggcaggtgagtggcaggatgcaggcaaagcaatccagattcttcttctgtgatggaattttcaggcctgcattacctagtgcacctcactcccatgtgtatctgtactcatacatccactattgagggcaggggagagagttctaaagggcactgaaaagccaattaagtgctgggttctgctgggattcatcatacaatgaacaggacacggtgtcagacacagtgttagatttcatatctcagaatcacatggaccagggtttgaattactcaagcacccttagtttcaacaaaggtagtaattagatttttaaagggttaaggcataggccttgctcagtttttgttaggattaaaggggaaaattgcataatgcactcaggatggctgacaaacacaaaatgcacataggactcccaattctccacaactgtatggagccgccttctctcctccaaaccacctgtccacttcactcccagtctttctcttagcagatgacctgacttagacctttgcaaagaagaaaggccactagatgagcatttgcttcccctcaaagcctctaattagatcagttcttgtaacttactcttcccccttcacagccccaaaaatggtactgagagcaaatccaactgaaagtgctttccaaagtgtgttccataggaaggaaggtgtaggaaaggccacatattacactagcagcttcagaggccattggcacattaaaggttttgagagattgcacagttaaatattgccctgaagcatataattaaagaatgactgaaaagcaaacttactcttttctgtgaatgtgaaaaacatggacttacagaattacaaagtagagctcagaggagaatgtcacccacattactagcactagagaagctgcttctctgcatcagcctcaaagcatgtgggactcaaaaagtgtgggctgggacacacagtttaaatgacactacgataggccacaagagttgattggaaatagtgaataggtaaatctcatatacctgtaaatgcctaagctctgcaccaagcttgtccaaccacccatggctcatgggccgtatgcgacccaggacagttttgaatgcagcccaacacaaatttgtaaactttcttaaaatgttatgagtttttttttttttttgctttttgttgttgttagctcatcagctatcattagtatcagtgtattttatgtgtggcccaaagcaattcttccaaagtggcccagggaagccaaaagactggacattcctgatctacactatctcgttttgttcattagtttcacagacattaggttaactctccaattagactttaggcagcctgtccctcaactatttataataattcaaagtatacgtactcattgaaaccaccgcctgccagaaagggaactataacgttttcaggcaggcctaagatgagaaagaagctgttaagccaaaatagctgatatcagttaagggggtggggagcagaaaaaacaggagtgacatttacaccgactctgtgcaggtattgtctaaaggggctttcacagccacgacctcgctgaatcaccacaaccatcctctgagaggggtgtatctccattttatagatgagaaaacacacacacacgctatggatcatttttaaaaactaatgcaatgaacaagcctcctttcagtatatattctgtgtattcccaccagccaggattttgtcaagctttacaattacgatggttttagaaaaataatatttatattggaaatgctttctcaaacttctccttgagtttcactcctcacttatgagctgatgaccctcagcaagttactgagcatcttggcacctcaatttccttttctataaagtggagatactctccttaccacagctccacgccttttggggaagcagtccctactgtccctattatcaaggagagttggtgtgatgccagagaaatggcacaagctttggagctgagccaccaccatttggcctctgctctgcctctaaacagacagtgtggccttaagcaagtcacaacttcccagggcttcagtgtctttgtgtgtaaaatgaggagctgttctgttgtgaggatgagacgagataatgtgcacgcaaggcctggtatttaggaaatcctccacacaaggaagcagctgctgtttgggtttgcttcccagcacgtcccattgcagactgctggtgggtcatcactggaagagatgaggaaagcctgatgcctggacttggctgtgtagcttctgactggctgtttctcttacacactccctaaaaattaggtgaggcagggtggcctgataaacatggtgactatttatgaggcacccattcctaagccaggccctgtgctgagtacttcacatgtattaacttacttaacccacaggcttaacccccagcctatgaggtagggattcattacagatgaagaaactgaggcacagcagggtgaagcaacttgcccaaaatcccagtgttggttcacggtagaggcagtatacaatccgagctatttggctctccatcctgtgctcttcacactgtcccactctcctgttgggccttacactcagacaggtataggcctggatttcaagacccagtttcctcatcaataaaacagagttaaaacttcccagatacttgagaaaatagctaaaaacatgcactgtacccaacacatactaaaagtacaaacaaatgtctatgtggctatgcaagaatatccaggatgctatgcaggttggcaggtaaaggcagagactggagggacccagctctgcactggccagcaatatggatctcaccaagtctcaggatccttctttgtagaatggggattaaaacaggattaaagaagataaaataaatgaaatacttagcatagcgcttagctaacaacataaaacactcgactaactaattatatcattcttcaaggtcctgccccacttatatttgcctcaattctggaccaaaatcgactagaaatgctatcagctgccatgggctgtaagtggaaggtcacctgacaggcattcccagtctatactgctctcaaggaggatggggagtggaagaggaggggaaacctgaagaccaggcctcctgatttttcaaataataagagcacatcattcaaagaatattagttccatagtgctctaatcatcccgcagggcagccacacgcatctgttcaaaggagctggcctgccagctcttcctgagaactgccaacagctgggctactgctcccagtgagcggctggccatctgcagctgtgagggtgcttgattcacaggcaggaaaggttagagcagacgtctataaatagtgttttttggtgtctccctgcaaacatcgtaagttatggggaaaatgagtctcaattcaagagcccgaatcacccaactcctcctatctttacagggggaataaactggcactaggtactttcttgccacagttacaaatcctgagaccagccatcttctccacaaaaataaccactacagaaggcacgggagcagctaaagctcacttccagcagcagtgacccctcctcccaagtgcactcttgctgtttgcaattcgaaccttcagatcagctcccaactcaaacaaactaacgtaaaacctaaaacaacaacaaaattctccggtttctcttcagattgtatacatcttttgccttttactaaaacaacaaaaaaaatttaatacaactgaattttctcaaaatattttaactgagacaacttattcattcacttgaagtattttcccagataattaagattttgaaaaagcccagtactgactgatttttgaagcaaatctgagaaaattttcaggaaaaatttcaagaaaagttcaagacttttggcttctgatcattttggttcacaagacaatgaaaaacatagtaaaatttatgagaaaaactaaagcagctgtcctgatttagactgaaaagctaaagtcccatctcacttaactttataaaactgtggctgttttttttttaagctaagttttcataaaaagccagaactgaaataaaatgcaagtggaactggcagtgaacactttgttgataaacatcatggtgatatcaagttctatcttgtgctcattctccacattaatatttattcctatcatgctaaaatagactttaaagatattttaattttctgagatgcagagtttcacacacataatatggttagactttccaatagaaacatttcctgttagtattataaaatcatacccaaagtgcatggtgttctgaagttctgagccctcccttgtaactggtggtgggcataaaaaatatagcctttttgaagggcaatttgacatcttaaaagtatgaagcccttttgaaacaataatcatatgtctagcccaagtgtacaaagatttaatcacagagatattcactgcaatgttgtaattctggtagctgcctaaatgtttaacagcaaggactggttaaattatggcacatttatgggctagaaaattatgtaagcattataattaaaagtgtagaaataagcttactgataaaggatgatagccatacttcactgataaagtaaaaagcaggtgatacaacagcatgtttacaaatacatgcaaatgagtaagagaagaaagatacacttgccagatatttctgggtgttagcttcaggacagcttttattctttacctgcactttctattaagatgaacatgtattattttaataatcaaagaaaaaaaaaattaggtgccctataaagctcatcacaactgacagggacactctctgtgagaatagctgtcctgggctagtccacagcccttgatgcagtagatgaaatgatgagaacagggatgacttaactactttgggccaggtaaatctaataccctgaactctgacccttgctcctgatgaggcatgaatggtcaacaggcaggtaagggattccaggagagggccagccagaagctcagagggcatggttgttggaagaccaagctttgatctctgaagatagtgaggtgagcaagggcagtagctactttgagaactgccagatctaggttagaaaggatgtctcattgtgcaggagtgcaggaaggaatgccagtcagaaggcctggggtcttggctctaacacacaccagccatgtgcccaaggaaaggcccctaatatccaagagcctcagctttctctctacaaaataaggatcatattggcaaggagggtcactatgctctaaatgcctatcatgtgcacagttccctctgaagaacactcatcaggtgaccccatggccatggccaaagctaagtggatcctgagagaaggcagcctacctatgggctggccaagagtctggtgggagaaccgtatgagggataccagtgactattaaccaatcagatatcatcagaggctttgaatggaagatagagaatgtctgttagtagagggtacaggagtgagaaggcagtagcagaggacacaatgcagaaaaagtcacaagtggcagagtgagtgtcaggaagggccaaataagtagaaataagagctgctgagctgtcataatggtggcacaccagcctgcaaaggggcagcaaggttcctgagtgtccctgcatcctgagcaacacactgtgaggcctggctaggcaagagtctgtaatttcttattccccttggaatcctcatttcagccttaagccatcaaggagatgacaccttccctgaacaccctagattactgagccacagcagcaattacgtacactttctgcttacattgactgctcactatggaacagtgttctacatgcatcagctcacttattccttgcaacaataatcctaggaggtatggactcttattagtaccaatttatagttgaggaaactgaggctatatagtccaaggtcacactgctagaaagtgaagcagagatataaactcaggtctgttaactccagtccatgttctccacactcttcctcccatacaaataaaatttgaagtattttgtaaacagtaaagagctaataaccaaagtgagtgatacacagggtctgctgggcttggcaggtgtgattgacagagtctggctctaacctgtgctgccccttacctgcccagtttctgaccctcgccagtgaaggctttgaaggctcctttgggcttcacaaagtcctcgtcccgatggtcctccatatccaagttcacctgtccaccgtgagctagcctccgaagctctgctggcacctccctgtggaagaaaaggccatgctgaggtccacagagagaagatggaaatgacagtgatgggaaaaggggagaagaaacctctcagtcccgtggtgaaaaatcgctgggcctccaaagggagcaggctactctggtggctacctgtctgcctccaccttttctcttgtttgttcagccatggccgacacctatttcttatttggccacttaggtctgcctcaggcccaaaggggaaaaatggacatacaaggtttttggagcagatctatgaatccgtatctcaactatgctgaatctgcttcaaacaatttactcctcaaataataaacattctgcctcctcctttcccaactgctatccactcactgatttgggacctacaggagggctttttcactcaccctctgcggatagactccagaaactgggcattggatgggtcttggtagcttctgagttctccattatccaggctgaatccactcttccagagtttcaatactacatgaacctgtgatgacagggagtaaacagttaccagggatctggcaagcataccaatttgaacttgcaaattagcaggtttttactatttctcagtgttgctactattaaaacacacatagagacacacatatatacatgtgtgcacaagcaactcaacaagcaaactaaataagcattaacctagaataggaaggtggcctagcacagactaagagcaggggttttgttttaggacacctgaggttgcatcttgactgtgccactcactagctatatggctctgggcaggtgactcaatcgacgctttgcttgtgcttggtatgccgtgagtgtccgactaaactaccatggcaaatcttgctcatggactattccacagtcattaaaaatgttatctacaagttctgttcacaacaactcccacacacattcacagcaaagggtctagaaggctaaaaaccaatgcattagcagctgcctcggaggataaaatttttattttcttcttgcttgactttattttggaataaaacccaaaatgatttaaaacatattatagaaattaatgatcacaagactacaagaagatgtttgtggtataatattgaataaaaaagactcaaaattgtgtgtatgattacacttgtggggaaggagaccctatgcacagggctaaaaagtagtggacaatgaggaaaactaaaaaaaaagaaaagaaaaattggtgttaagtcttctctggtggtctgaagaccaagttcttcagctatactcgcatcactagagaaccccagatacactgtacctctgcctgagatccatgggctgctcaaaaaactccttcatttgcccatcccctttccccacctgttctcaccagctctctcacccagcacccaggaaacctcctttgattttccagtaagcgtctttgttcgtgaaccacagcaagggcactgtctctgttagtttccctttcagaggctgctggttaatgcacaatatgtaaccaatcccttcagaaaaatggcagaacagtccacaagcttccctcatgggaaggtggatgcactcacatcttggctggaatgctgcctcttttctcctgccacataggcagactcttcctctggtgctgccccaaggcggtagccacctcctgcaaatggctataagggacaagttcatacacatttaaggggttggtccatggtacaagggttactcagatacaatgatatatatatcttaggtaagaggaagaaagaggacagggttcctgatcaagcttgttagctactagatgcactttctctgatatcagactcagtgcctacatgcccaggcagtatggtaaatgaattaggtggccagaattggggttaagagctggaaggggcagtgcctggctaaaggaaacagatgctactaaactctcattaaccgtgaccatgtaggaatttgggtacaagacaatatcaaagactttttgattttctcaaaggagacagaaatcccgattttatataaaacagatgactattaattcaagtaaaacaaaataaaacactaagtcagtcaaatttgataggccaaacaaaacatgtatgcagaacccaatctagaccataggctgtaggtctgaaaactctgccccaaatcttggtttcacgttaaagggtgagataaactacactcgtgttccgcacagaagaccaagtaagcaaatgaaaaaaagaaaaaaatcagtcactaccggggtgaagaaggtggcattcccagttctggaatctcagtcctgtgggcacagacaatgacccttatactcactctcggtttactggtctctccagggctcttggtcactcgctccacagctacagctccatgctctttggcacctttaaagagatcatccaccagctcgttgggacttttcttcctgggagggccaacaatctgctgtccacttctctctgagcccccagcataaaacctgtgtacaaaatacacctctaacatgaaacactcatggaaaacatgaatagagcatgtgccaggttggtgctgggcacactgaggcaaagggtacaatgcttgtctttaaagaatttactggctagttgggaacacatggaaggaggcaagcaggtaaaatgcagtgtgagcagcaacagaagtcagtgagggaacactgggtgggaaggacagccaaggcttcctttaagggtgtcttctgggctgaatcttgaggataaggatgagtttatcaggtgaacaaactggggaaaggcattccaagcatgcaaaacagcttatcagttcaggagagagtctcagctgggactatcaatctggtggccaggctcctctccaggagacagtgactacagtcatagtcagaagtagctaccactagtgacttggggttaatggtggcactggcatggttagtacaagcagctaggctccagtcttggctctgccactgtatgtcctgggtaagccagtgcactactctgtgactcactttccttgtctttgaaacgggagggaaggaccacatgccctacctacctgctccttaagtcagagccgtgaggttcaaatcagcagatgtatgcaaaagaacaagcacagagtaatgcacacaggtaaggtggtgtgacacagcaccaggagctcccccaagcctcacctcaccttgccattcatgtgacacacactgtggcccctgaggaaagggtactggaggtcagagaagctccaatctcaaatacaagccccaagacacccacactgggctttgcaataggccaggcatggcttgagataataaagttagtacttttttatatgggcctgaaaaccagttgtcatgcagcctggcccactgcctccttattactcctattcagagctaagtcaacagcttgtccccaagcaagaaaaattgagaacctataaaaattagtctcagccctctatttcctgacattcaccagggaatgagaggcaaagccacaggccccgacaaggacaacagtaccagtgtcctttcaggtctgaaatgctgaggggtcaaggaagtaagcggaatgtgaaataaaggaaggtcactgcctggaggacgtgactgggtgggaggagaacgagaaagacatttaggagctgggcattcacgtacttgatgacactgcctttcactcaggagtgtgaaaccccaaaattaacatatatttttatatccagaagtatctaaaaggaaggttttgagtcggtgtgaaggtcacaataggaatgaaaatagagaatagaacacatgtaatttctcagcccacttccccaaagactgaccatgatgagataactgcattcccgaaatagttattatacaattttccttaggaatgtctgacagaccgaggcagatcctgtggagaaccaaaacccatgaaatgaggctggcgttcattcttgttcattccaggtagatgaagttctgctaaatggactataaagtctttattaagggatctcaaagccctggcttcagaactgggagcctgtgatcaagagccttaaaaatatgcatgcccttgacctggtatttccatttttaaaaactatcctaaaaaaaatctgaaatgtggttaattaatccacaaaaatgttcatagcactgatatttacagtagtaaaacattgaaaaaaatctaaatgtcaggcatcccatataatggattattattatagcatatgaaaaggcatatgaaggattttaaggacatggggaaacgtctgagatgtagcattgatccagcaaaaccatatttatatacagaacaaagactggatggaaatatgccagaatatcaaccgtagttaccaaagggtagatgagtttaagactttttcattatactagtctgtagtttccataatggatatttttattataatgttctaaaggttaaaaacaaatagttgatgggtacatgtctattgggggaaatatacacttataagcctattattctgttttttacatgatgttttttaaattaaaaagaaaaagctggaaagaaatataccaaaaaatggatacctggttacgtatggactgtaatataatgaataactttttctttcttttccttattttttaaaattgtaaattggcaatttataattgtatatacttatggtgtacaaagtgatgttatgctttaacaatatgaagtggattaaatcaagctagttagcatattcatcacctcaaatactcaaaatttttgtggtgagaacacttgaaattaacacttggcaattttgaaatgtacaatgctgttttattaactatattcatcatgctgtgcaagagatctaaaaaagaaaaagccccaaaccatattcctcctgtcttaagattttataccctttgaccaccatctccccattatgccctcacttctgcctctgtaaccacactctgtcgattgttctagattggaattgttctagattccacacgagagcatgctttatttgtgtttctgtgcctggcttattttagttagcataatgttctctatccatgttgttgaaaatgacaatttccttctttttaaagactgagtagtattcctactgtgtatatacaccacatttgctttatccattcatctgctggtaagacacttatgctgatccataacttcgctactgtgaagagcaccgcaatgagcacgggaacgtagacacctctttacaaactgatttcaaatctttttagtcaataccaaaaagtgggactgctagatcttttccttgtttccctcccctaatattcctcaataaatacattaagtaacggaacaggggtcacttctaagctacaaggagtagaagagacttcctaagatataacccacacagaccagcccacagtagtaatggctaacaataaccaaacatgtttaccaggtcctgttctaggtgatttacacattaccctggacttccctgtgaactgtccccctgaccccctctagaagactcacctctggccttcctcttcctcctcatcttcatcttggtcatgaatgaggtctctgaaggatgtcactctattatcactggagacacagaaaggagcaaaatgatctcagggagcattaagaaaggtaaccctcatcaccagctgctaaggaggtgaagacactgaggttacatttttggtaggcgagaggaggacgttatgtggagaaaggttaatcccctaagattacacataaaataatgtggcatttattttttcaagatcacacagattgagtataaattagaaagtcctatcatgaggtaaaatggaatcccaatttaagctgccctggctttaataaaaactagaaagtatttattaatatttaggaaaaaaagcagtgttgtgtggggtgggcacaactaaaaatgagtacagacttaagtagtacagacagcggggagtaacagggaaactaagaaaggcttcccagaaaaatgaaatatttggaccaactgccaaagaactagtggacaatcatggtgatggggctgctggggaaaaggggttggtgtagcattataggaaagcagcatacacagtgcacagagaccagagagttgaaggaaggacacatagccaagaagtaggaatgaatgaatacgagggtgacagcactggaggaaaagcaagctccagtgtacttctgctgcaggttagtcaagaagtatttatttttagaaaaaaagcagtgttgtatgggatgggcacaactaaaaatgagcgtgagaagggttaattctctctgaaattatcttccactgccactttccacctagtttagatctgtcctcaaggaacaagcttaagtttttcaaggatcataagacaagttttatcaagatttaaaaaaattctgtatttcttaggggaaaaaagcagcttccatataatatgggacaaagagggtgacatggtttggctctgtgtccccacccaaatctcatgttgaattgtaattcccagtgttggaggagggacctggatcatgcaggtggatttccctcatgctgttctcatgatagtgagtgagctctcacaagatatgatcgttttaaaatgtctggcacttcccccttcacacatgctttctcctgccaccatgtgaagatgtgcttgcttccccttcgccttctaccatgattgtaagtttcctaaggccttccagctatgcttcctgtacagctgtggaaatgtgagtcaattaaatctcttttcttcataaattacctagtctcaggtagttttttatagcagtgtgagaaaagactaacagagagtaatacaggtttagtgaggctttaatgagctgtttactaggaagaaagctccagttcagtcttgaagatttatttcaaggagacaatcaggggacagaagagttttgaggatccatcaactagaagtgagaagacaaaaaccaatcaatgtagcaaacaagctccctgcatgagttggctcctgagaacagtctgccgggcattccttgatgcttgatatgacatggttcaaaaggatccaagtgatgagatctgtactagtaccctgagagtactagttccactcattcatcttcccaaagggaattttccatacatgctcagcctaaagtttcttccaatgactaggctaggatgagcatctatgaaaaaaatattttctatctccctgttgttaaactttcaaatatatgtgtgtacacttgcttgggcaaatcacttgctctgctatggctttgtttctttcccccaaaactcatacacccagactctgatggtatccgacattgattctggtatccatgtaccagattccaatcccaattctgcctcctacccttgggatcttggacatgctatttaaattctcaaagccttcattttctcacatgtaaataagacaatcacagcaccaacctatgggctttctgtgtgcaggtggggtactgatgcacggaaagtcttttgcatggtgtggcacatttaagtactactcttgagtagcagttctcaaagtgtggtcatggaccaggagcatcagcattacagtgaacctgtcagaaatgcaaatccccaggccccctcttaattctcctgaatcagagcctctggaaggggtatccagcaatctagccttaaggagcccctgaggtaattccgacatatattcaagttcagaaccactgtctggagtaatgctttcagttaccttatggcatggatgtcctagggatattagcaattgcacaatacttttgtcctatggtctctacaaattggctaaatatctcagaaagttcaatttttcaatattagaactatctcccaggctactctggcatactgaagtggcacaaaactccttcatcagatgacattttctgcttttaatccggttaccctagctctgcctctctgtgatgatggaaatgctctatctgcactgtccaacagagaagccactagccacatttggctattaagcatctgaaatgtggttagagaaaacgagtaacaatgtttgtttaatttcaattaatttaaatagctagtagctaccttgttggatcgtgtaattttagagaatcagacaatcgtagttcccggaagtttaaagtacaacttttgctggatgaaagaggggaaaaaaggaagaaactgttacctcttgcttgaccctgcatacaggggtgggaggtgctggcagggaggtagcatgtggcagcagaagcagctttggacttaggcagacttcgccttgaatctgtggtaacagcagctgtaagttacttgacctttctaagaattagcatcctgaccagcgaaatggtaagcaccttacctatttcaaagctgttgaacagtatcagaagagaacacaggtgagaaacatggcagagctttggtgactgctcctgaaatactagccgtcccacttccaggaatttacaatttacttggggagaaaaattaagttaaatatcaggaaaagagttcagggcaatgtgggagagatgccacccagtagtacatggatatagtcaaagaactgaaggagtgatagttgtgactggagttctgtggaacagaattatggcgtgcagcctggtcacagggttagcaataacacgctcagcagagtggggatggaggtaaacatggaaggatgcatgggatttgtataggcagaaagcaagagagcgggcacacctgatcaggtgagaggctcaaacaaaagcaggagaaccaaaaataaggaagaattagagcaccaaagaaatcagtttggttggaacaaaggatttaagaaatgaggaaaagggaatcagattaggaaggtgggtccaagggtaaactctggaggactttgaatgtccacaagaagaggcagaacattgttggggctgagagctgaaatgctgaatgtagaaaacagccctacacttaaatccttgttttactagctctgtgatcttggaaagatacccaacttcagtgtcctcatctgtaaaataggaatagtactaacctcagtgctaacagtactaacaacagtactaacctcacagggttgctgtgaggactaaaaagatgttcatgtaaaagcttaactcagtgcctcactcgtaaatactcaataaatggcagctgttattactgagtttaaactgtctcctatagcaatggttaacatttttatgtctgtcagccctttgagaatctcataaaagccatggactctcttgccacaaaagatacctgctaacatgtacacaaacttttgcctgtaatttcaggtattaatagagaccttctcacgctcatttcatagattcctcctagggttctcgggctccatattaagaatccttattctagagttgggtgttgctctgaggcagcagtgacaacataaaagggtatgtgagaagtcaaaagtgggggatgggagagggcagcagctggctaagtgtcctgcaactgccaggtcaaagcagaggcaggccccacacagaattcctctgaggtgctagcacaagtttggtttttcctgagaatgtagtcctagcatttgctttcctcctcaacaaggacaaaccatgcaacacactgcgccctcctccctccctttttcttgtcttcagttcttttctaagcctactaccaagtctgagccttaaccagagcaataaagcaatgcctcttggaccaaatgtgcgtccagtctttttactcacttcagttctaatgttaaactctatgtccttgattcttttacttttatgccttttttttttttgagacagagtcttgctctgtcgcccaggctggagtgcagtggcgcaatctcgactcactgcaagctccgccccccgggttcacgccattctcctgcctcagcctcccgggtagctgggatgacaggctcctgccaccacacctggctaattttttttgtatttttagtagagacggggtttcaccatgttagccaggatggtctcaatctcctgacctcgtgatccaccagtctcggcctcccaaagtgctgggattacaggtgtgagccaccgcgcctggccacttttatgcctattcttaaatgtacatacttgttggggaatagagtaaacaaaacaggtcaattgagaatgaatgctaaaaatgataatactaaaattataataacaacacatgctgtgttctatttgctttgtaagtattaactcattcagtctcccatgtggtaggcactatcattaccatttgacaggcgaggaaaatgaggaactgaaacgttaagtaacctgcccaaggtcacaaagcttttacttaagtggcagagctgggatttgaaccaacgcagtcaggctcctgggcccatgctaataaaccactgccttaatagaactttgggattactggagaaaagaaaggagtaaacatgtaactggcattagagactaagtttaaatctctccccctctataattctgacatgccaacatcccaacaacaccctaaggtggctgtcaaagactcataccccagaaaatcagccatctctactagcagctgcaagaacagcacttaccctaacaacatgtcccaagcagtaatacccagatgtgccatcaccaacatctcataggttagcacgtgcaaacagttacaagatcactttcctcctacctcttttctctggatgggagttagggaaagaagaaagcaatgagatctggggttagtgctccttcttcgaagggaggaaatatattttaaacctcagttgcctttagagagaaacataatttaccacttcatggcaaagaaacactgttggttatattctggggttgaattcaaacccaaataaaatttcctggctaaaacatacactagagagtagaagcaataaggcgaaagcagagaggggagacacctctgcttacacactctctgtaaaggttcagacacctttacaggaagcacccctgcctgtctcctggaagaccagcattgtctcactctgcagagcacaggagtaatctgctgtgggtgctgtgggaggcagcgacaggggatgcaaatgggattgcaaaggttaacactgttttacctagtaagacaaggtctccctaatcaacttggcaaagggtgggttacacaggtttattttgtacaagacttcttaataaggtaacgggcatcctaaaatatcaaaacagctttcctaagtcatttcgcctaaactttcacatctatagcacccttgaaaggaagttttttggcttttacttaaaaactttagagttgcagtggtcattcctcatactacataagtaaaagtcttaaaagtaggtttgtggtttcccccaggattgaaccataaaccacacccagttaaaagtcatgcatctctgtataggaaatgactgaggcctgctgggaagtactacccattgactcagtctaaccttctcattcagacctggtccacacacccaggcctgaacgctctggtcagaaaatagctcctcttcactgctggaaacactcatgtagcgataattgaagctggcccttacctgggggctgtgcctctggacactgaactgggggttgcctgcgaaatggtcacaatgtcttcatcccctccgtcctcataaaagctcgctagcgcgatctgaaacagagaggtagtaccttgggacccttaaacaggccttcacctaacgcacatctcctttgagcacaaaggaatacagacatggccaacacttacaaggtagcttgcatccatgggccaaagaaaattagaccagaaggttaacagctcagctgttagtcttcgtgtcaactgaaacaaattccacccactaaggtgaaaagaaggcagtaagaatggctggggtggaagacactctttattctcattttatgaagaaacgtgatctagtaaaagtagcacacatttagtgagcatttacatgccaggttgttctgagcattctacatacgttaatttgtttaatcctcaagaactctatgctattagtactcttatcatctcattttatagttgatacagaagcactgaggattaaaaaaaaatttgttcaagtttacacaactggtaaagagaggagccaggttccatccctgctagtgtgcttaggccctcactcttaagcgcttccagtacagcccggagtcaggaactgtggagtcagtccaggttgctacttttcctttctttcaagttgtttcctaatctgtgaaatgggggtacctgtctcaccaacctgcacactggatgagataatccattaagatttatgcatactcgcatcttaggtttacacatacagaaggaatatgggaatcctttggtcatttgtgacatctctgtcaccaactcaacggacaggcattcactaatcacttgctttgcacaaacacaagaaagcattgaggtcacagagatgaaatagacatggcctctgtcctcagggtcaccaacttcacaggagacagtgagctgtcaagggataaaagtaatctgctgggaggcagtgtgctgtctcaggccatgtagtgaactggcattctcagggagcctacattcaagtcctgttcctgccaggcaagtcacatgcatgatcctcagtttccccactacaatgtgaggggaacgagacagaagatctgttggtcacaacactgtgtgcttttaggtctttcaggtagaaactttttatttctgcccagcataggggcttcccattgtgtctaggtgtgatctaggtgtgatgctttaccgaattcttatgtttggggagtaatttacgtttggcagcagactcagttcaaattccaaccccgctacttactggctatgtgaccctgagcaaattctttgccctctgtgcttccaattcctcatccataaaatgggtctagtctttacctcatagtgttgctaggatccaacgaatcatattatgtaaagtgcttggcacatggtggtttaaagcttgggctctgtctgcttgcaatcagacagaactgggttccacttctacctcttctgcctggtagctagtgaggccttgagcaagttacttaacctctttaatctcagctgcaaaatgcgaaggttaaatgacaaaagacatgtaaagcagtcagaacagcgcttggctcatggtaggtactcaataaatattagtcatcaccgtcatcatctacctaagacgaagctggccaagaatatttatgcaattctttctacagttaattaccgaatgcttattatgtgccaggcattgttccaggcactgggaattcatcagtgtacaaaaatccctgcctcgtgaagcttaagtcttcttagcaagtatttagtgaatactcagtacgtgccaatgaactacacagcaatttccacgagactcccattttacagataagttaactacgcaaggtgaagaagctccaaccttgcgccaccaccccagaggtattctcccagcaattaggaaggctgggcggcggtcaactcccgggctggacttcggaagtggaaatgagcggccacctagtcccgagtggggcttcacccaagagctgctcactcggaccagcccggcctccagcagatactcggcgcggcagccacgcccccaggcgctccctctcctcgccggctgccgcagcgcccgaagtctcgctgacgccgcaagcgggcgaggcagggtgaaactggcacggcagaactggctggggctggcccgcgttcccccactcccaagccgagcaggcgacgcgtgacaagcggtcccgggaccatgaggcctgggtcgggccgcggtagagcggggatgactgtgcgcttcggccgccgcgggcttaaggcaccaggcgcccgctcccagcagtccccggcccacccgacacagcccgccgcgcggcgctacctgcaagtcccagccggccgactcgagaaagaagcgggcccggtcctcctcggcgcccgtcaccgccacgaactccctcagcgcctcctgtcgctccgccgccatcttcgccccgtgcgccttccaaagcgctccggcggccgccgcacaggcccagccccgctgccgcgttccgcttgccggtcgacgaggcccagccgatgagggcccagcagctgggagcccgcccgcagccccgccccacgcggtgcctcacgcaaagccctccgtgcgggaagccccgccgctccgcgccctctggcgaccgcggcgcgaaccgcagcctaacggcgggggtgggagcccgaaggatgagaggcggggcgggtcttacatacacctgtgggctgaaggctccctgcaggagtcagattcccagttattcattgacgcagccctcatttcattaattgtgcattcgttcattcacttacttgtcaagcatttactgagagctatcaatggcccgacgtttttctagggctgtggatatggcagggagcaaaacaaagtccctgctcccatgcttcttacattctaggggtaaaaattcagaccttgaacaggctaggcctccgctcacaacacgtccatgcctcgttatctcgccccgcataaaagacagtctcatggcctgcctgcaggacccatgagagatgggccagttcctccctctcatcaagggatccgctagcttcctctgctccaggcgccttgccctccttgctgttcctggaacttgccagttatcttgcatttgcctcagggccgttgcattagctgcttctgtgcctggagcacctttcccttaccgatgggcaaggcgctctccccgctttctttgggcctctgctccaaggccactttcttaggcacaatcctgtcttctgggtcctcagcttctttgccctcttgcctctccaaagaggaacttacttgttcagcttacttgttctttgttctctattttcaaagcctaacttccttgttctttgtacctccttacccctagttacggtaaacaaccttcccgcgggtcctaatctataactcacatctgttcccttggataccctcgctacaattgccattcccgcggaaactcttcttcctgccgaaaccgcttgccctaccactgtagcccacatttctgctccatttgaactagccaatcgggattagcttagattgcgcagtccagccccagccaatgggaacaggacacagaagcagcgactaaccgcattagggataaaaaccccttctctcttttgttcggtgtgctttcctgaagaccagatgtgtgagtggcacccttctgcagaagtaaattggctttgctgaaaaatcttttatttcagtgctggttttccttgagacttcgagctttaatttccaacaccaccgtgggacactcttcccttcctcttcctctgtcggcccctgctcattcttcagctctcagttcaggtgtccctttctcaaggagaccttgagaaggtgcccaggcttagtcaaaacccctcttaatcaggttatgaacagcacaaagtccagtcttccctcaattgacacaatagttgctttcctggaaaattcggtgtcttattaacactgtgcaagaaatcctttaagtttatatgacaaacgagttagggcttgggttaggttattaggagcatggttgcagccacaataggccctggcaggaggcatgggaggagggtcctttctttgtggtgtgagactctcctttctattgcaaggccacccaggaccagccccggtccctaggacttacccctttcatcattgtgtcaactcgaaatgcaccccaactttccaggaagtccaagaagctagaggctcactctggacctcacgattggcaaccagtaaggtctttctaccctggaaactgacaacgactaaccccagcttaaagatctgcaggcgatcagctcctcaaggtccagttccctggctggtattggagtcattgaaactcattgtcaccccccctcttcatttttgtgccatcagggaaagctctttgttcggccagagggtccctgatccctcttctagaggacttgagggcatcctttcccataacactacctggcagctagtgtttactgagcacttactatgcccctagacactctgcaaagagccttagatacactaactcatgcaccctatgaagtgagttctattgttatcatttccattttgcagatggggaaacctagacttctaaagagttttgaatccaggtatggcacagctcctgagtctgcttctaaccgctacaccacactgtctctccttagactgcaggactgtgctggtcacttcctatggctggtttctggaagcagctccagatgacccaactggagtttaaggcaggggatgtgagggcatgaacttgaaactacatttacataacacttatctaagtgtccttaacaaaactagagaaggaggtgctgcaggctcagctttagctccactctcctatgtccaaccacaccagcccccaacctccagccccatcccacccaagccccatccccaaattctaccaccacgaccacctccagcctcacctctacctcacagatccgccaccagcacctgacccaccccgccccactttcccttctaactccaccctcagtactaaatgcaccccaccctccaaagcccactttcactccatttcacccccagccccctccgggctcatctccatcttccttcccactccagtctcaccccagcccctccctttaatcctatcttccaccacctcccgccccaccccagccttcctttggcaccccctctgccgtgtcctcactggtggtgacttcactttgggcaggagctgtgtgtacccaggactggtgtctcctctgaccccctactccagtcccctaagcgctaaaccctctatagcttagggggccaggggagctgctaggtggagcaaatgattgatttctcagctgacattcagaccttccagaggcccctatacatggaagctgccggtaccactcacccttctctactacctcagcctcagcactgccttcttctaccactcttcttcacaaaaggtgacagagcgagactctgtctcaaaaaaaaataataataataataacaacactaccactgcctcagcaaagttgggactatttgtctctcttttcacaacatcttcaactaatgacaataataataaaataacagtactgccagccggtgactaatgcttggttgcattagtcagcagtgagaaccaatgaaaactgcaatgagattcccttttgccttatccaactggtaaaacatttacaagtctgactgttagagtaggcagatagccagaaataagcaggcaagggagcgtttgggaaaagaagtcctggagactccattcactgacagtcagcgccacccactggcggccagcaaagagacaatggctacactggcaacttctggccttgtggttgggctcctctggccctaaaggggacttatgaggccttacccagagataaccatggtagggactttcccactgacgagcatgtgcactcctccagtaactcgccctacagtagccttttgctcattataataacaagccgggcacagtggctcatgcctgtaatcccagcactttgagtggccgaggtgggcggatgacgaagtcaggaatttgagatcagcctggccaatatggtgaaaccccgtctctactaaaaaaatacaaaaattagccaggcatggtggtgcgtgcctgtagtcccagctactcaggaagctgaggcaggagaatcgctggaacccggaaggcagagattgcagtgaactgagatcacaccactgcactccagcctaggtgacagagcgagactctgtctcaaaaaataataataataacaacaaaacacacccctgagtggagattttaaatgctaatgagacaggcaatgtgtttactagcgcgtacaaacacacaacattcacagccagggggaccacctaaaacatgattgtaagtgacgctccctcatgcccctgcacgaataatcatgtaagattctcataaagagggtcccccagcaccagctgctgctggctcgttctttcagagtgtactgtctctttaaataaacactgctactgctgttttttgcctgatgctgttttccagccaggtcagcccactcctttctaggaacgtactttatctttcttcaataaactctgctacttcacctttgctgtgtgtctcttggctgaaatctttcttccaagcagacaagaactgaagattcccgcacttccctgtaatgtgaccataggaaatattggcataagcctgaaacaacaggaattttcctgtgtctaacagcagtatatgttggcttaatggcattggggcatgatttggccaatctagtggagttgaagaagcacagaacctgtataaccctccagttctacttgtgggtgtgtgcacttgtgcatgcatcaggagacacagtgaaactgtctctgtttgggatagcgagaaactggaacaactaaggtctccatccatcaacagaaatcacaaatgtaatatgttaatacaatggaatactatacagttctgaagatgaatgaattagagttacaggtaaccaacctggatataactcaaatgttgagtcagaaagcaaggttgagaatgatctgtgtagcaaagtgccattaatcagtgccatttagatagaatttagaaatgtgcttgactaggcctggcattccccactttctcaggccaatgacatgtagctgctctctgggcggtgtgtcttgtggagaggacggactattcttgacctggctggcacctcctctcactgcaccccgataccgccaccccaatactgcatgcagcagggctgccatccttgggttgtcaggttataggaagcccctgtcaaatggtgtttgctccttttcttcctccagctctaggtctaacctgcagggggaaatggagggtcctcgagcccgaggagagtggcgtgaatagacctatctctcacagggagcagtcacaaagtctgggactttggcagccttgatgggggttccttggggcaggaagagcatgggacaagaaccatgggaagggaaggaaagagctaaagaagagctgcaggaaggagaaaacagaaggggagggagagaaacggatgccctgattcagggatcttggagtgtagtcactgacatcaaggcatcagatctgaaggcccaggcaggacatgtaatagtggcctgttggcccttagtgggggctgtggcatgccccctgctctgtctttggtgggtcatctcacctgtgcaatgcctggggccccaaagcagcagaagggctgggctgaggagttctgtctcccatccattccccaccctttctatctgtggtcagcaggtttcccagagtccccacgaagggccttaaattgttcatcttttgttatatttgtcttctttagtggacttgcctccaccttgctcccctgccatgtccctataagtccctggatccaagcagggccaactttctataggattttacaactgagtctgtggtgagtagggtcatctgacttctgaagttgcccgataaggggcccaggcactgtaggctgccatgctccttgtcatggggaggatagtgactacagtttatagttagaattgcataacaatagcctaatgaaataatgtaactataataattatttagggcttcttatgtgccaggtgctgcacatataccaatgcattttagcctcaaaactacctaataagggagacacgcatgttattaccagtttatagacaaggaaactgagagaaacaaactcacccaagagataagtaggagaactggaatttgaacctgcacagccagatttccgagactgtgtgcttcatctctgccatgtatgtagttcaggcgtttacggggtctaatacaggccaggcattctgcttggtgtttgctgttcttgtgcaagtcaagcacgctcctgcctcaggacctttgcattcgctgttccttgtacttttcagctcttcccctgggtatctgcagggctctcttcctcacctccttcaggtgtctgctcaaatgtcactttatcaggaggcctcttctgtccaccctgcataaaatagtgtcacttcccctttgctctggcaacttccttccccctcctcctgcgttgtgaaggccctcagcactcagtatagtggggcctgttactcacctagggttacttgctcattgtctgtcttctctcgggaggaggtaagctctgagagagcagacttctgtttctttctcagcacactgattagggcctggcacagagtcagctttcaaccacgtttcaggattcaatgagggtggctacaatagtggaccattaggttcctgtccccagggagctcaaattctagtggggacaactaacaaccatcaaggaagcagatacacaaacacacacgcacacacagacacgcacacatgcacacacgcacacacacgcacacacacgtgcacacgcaggcacacagatgcacacatgcatgcacacacacccacataggtgcacacacacatgcatgtgcgctcacacacacacaccacacacatgttttcaggtagcagtaagtactatgaagaaaacttaagtggcaagcaggaatgagagtgatggaggtgcttttttggatagagtggtccagagaggcctttaaaggtaagagttaagcagagacttgaatgaatcagggagctttgtgtggtcaaagtccagaggggtgctggagaagagtcagcttacaggatctggggagatgaggtcagagggggtggcagggaccagctcatgcagggccctacagggctagggggcttgcaagggcaggtgggacccacctccagttagtggagaaccacctccatgctttcctgctgtttcagcttcccgtggccgctgtaacagatcactgcaaacctgataatttaaaacaacagaaatttattttctcatatttctgaagtcccgaagtctgaaatcaaggtattggcagggccacacttcctccggaggctccagggggagaatttcttccttgattcttccagcttctggtggctgctggcattccttaacctgtggtcacatagctccaaactctgcctctgtggtcacattgctttctcttctacatcgaagatccatccgtgtctctcttgtaaggatacttaacatctcttttagggctcacttagataatccagggtaaacccccacccccatctcaagattcttaatttaatcacacctgtatagtcttgttttcttttttctttttatttttacttttgccatacaaggtaacagtcaaaggttccagagattaggacatggatatctttggggtgggggttagtattcagcctaccttccctaccctctctaatgtctggtaattcaataatttattccattctcagactaaattactgttgtcgctggcttagttcaagctgtttttctgtttgtggtaatgaaaaacatctagactcatctactcgccgctatagtgagtgctaataaatgtttgcctggaaagagaacagggaatttacatgtatcgagtgcatgcagtgcacacagcacatagtaggccctcagtaaatgcagaattgaattggttctttttttttttttgagacggagttttgctcttgttgcccaggctggagtgcaatggcgcgatctcagctcactgcagcctctgcctcccagttcaagcggttctcctgccccatcctcccaagtagctgggattacaggtgcacaccaccacgcctggctaattttttgtatttttagtagagacgaggtttcaccatgttagccaggctggtctcaaactcctgaactcaggtgatccacccacctcggcctcccaaagtgctgggattacatgcataagccaccgtgcctggtcttgaattggttcttacacaatgcagagaagtccacattagtatcctggatgttccgtgatgggaagggactctgattagtcactgagggtgcacagggaggaggcagaggcctcagggttaaaggcaggtgtgtctgactcctgggcatgcacactcttccccatgtcagggcttctcagtccactagatggtggtagcacccccccaggttgtgccaaccaaaaacatctctagacattgccaaaagtccagtgggggcaaaatcactcatcttgggaactactgccccacatcatgctgccccaggggaggtgatagtgggaagaagtgctggctagctagctgggcattgaactcaggtgtcccacagggcaggtgagaggctgtctgtatgctgctgtggtggagataactggttatcccctgatatctgccatctggtttctctagtgaaaacttgcagctgggcgcattgctgccagaaataaagactacatctcccagtgtttcttgcagctaggtgtgaccatgtgaccacattccagccaagtagagataagtgaggtggccaagttcctgactgtgcacttaaaggggagggtcctgctcccctttcctgccctcttttccagtctggctgcctagaaggtggacctggtagcaatgagatcagtgaatcctgggtctcaataccagggagtctctgtattgcttggcctgctgatggtcaactttctggttgatttccactggtttaagccactgttatttaagagctttgttatagttgctgaacctgcattctaatattatacctgcccaagccagccatgagggggatggaaggaaggcaggaaggagtggggagaaaggtgtagatggaggggcacagatggtctggctggttgagttcagagattcttacagacatctcctgggaagaagactctgagttggatgttggaggccaagaaggatgtagcgaggtggggaaaggggcagggcgcaccagaaagggctgcagcaggggcaagggtgttgaggagagactgagccagggactgaaaagcaaggaggtcttgaacaggccaaaaagagaaagggagacattttagagggaagcccggtgcaaagaagggaatttcactaggtggaccaaaaccagatgtagggatctaggagtttgtcatgaggcctgggggcacctagaggctgggactggaggtagggaaatggttgaggagccctggctcctctccaactcagagggtcctcactctggggctgacccctcactcttgacccttgctccatgctaaggtgttcatggctcctgctgggcctgtggtcttgacatcttcttgcccagggctcctccgagaggtagccagggccagtaggagtgcagccaaggtaattgccttcagccccaggaccacaggtgcgaacacaaccaggaggcctgggaggcacaggagagagctcaggcgggacccgtggtgagggccccacagcccacgcctcattgctgcccatgggcaaggtcacatcctgctgctgtataacctctggagctgtatcctttctacattgaaagaggagatcaaagaccacccttccctctgccctgggcccagagaacggttgcccaatattctgcctgcatctgtaatcatctcagtcacatccctaacctctgctattcctaattgcctaatgcaatcctcaaggtaatcctacagtgtaggatagtgatccaatttttatagataaggagacagacccagagtggggaaatgattttctcagggccacatgtgttaaagaagtcacgggacccaggccgtctggcccccatgaatggcaggagcagggccgagcatcaggaaggcaaatctgaccacatctatcacaagctcccaccagatactgagagtccttgaatgttaacatgagatgtgctaggcacagttctggacacctggcatgtgtgatctccttgagtgcacacacaaccccatgaagtagggtctctgattcttgtcccctccccgctagttcatagagtcagataccagactcaaggggcgagaacctgcccattacactaggaaggggctccatccaggaggcttagctacaaagccatgttctccagtgtcgctgtgcatagcctcacagtgtgtccctacactcagaatcacagggagctcaccacctctcaaacaacatttcccactaaacagttacatggccctggctatgagaaagttcgttatagctgagctgttataacatggttctctggggtcctagttctgcagttgagatgaagtcctgggagcattcttggtggcaggttagccccaggagtctgggactgctcccttcccatgaccaagccattcatggcccccttgcctgtgggggactcattgactccactgaggtgggtacgctcacctgttggagacatctcagttgcaggttcactggtgaattctgcctctttggaagaggtagattttgctgcaagggagagaggctttgtcatacttccctttatctttatctcccaccacttcctaagtcccaggagctgggatctctgggatgagtctgccagtttctatgtgggtatgggctagaagtcaaaccctgcagctatgaaggacaaagttagactttctactggagcacgtttagggtatggacctgtctaattcattgcagtgtctgcagtacttagcatagtgcaggacactcaacagtcatgtagtagatgtttgttgaattattattgttactattattttttgagacggagttttgctcttgttgcccaggctggagtacaagggtgcgatcttggctcactgcaacctccgcctcccaggttcaagagactctcctgcctcagccttccaagtatctgggattacaggcatgcaccaccacgcctgactaattttgtatttttattacagacggggtttcaccgtgttggtcaggctggtcttgaactcctgactcaggtgatccacctgccttggcctcccaaagtgctgggattacaagagtgaactacggtgcctggccaatgtttgttgaattattaatgatctatacagagttctgtggaaaccagaatggggagaaattaactctgcttgagaggaggagaaggttttacagaggaagggccatttgtgctgggccttgaaggatgagtaggagttttcagagaaaaggagaaagcattccaggtagagggaaaaacttatgtaaagacatggaggctgtgaagaactggcttgttcgggacatgtagaaaaattcctgttgaatacctgctccgctctcccgacaagtccaaaaccaattgtctcacctttcactttcaggctggtgccctgtccagacaggtattgcctgttgggtttcctctgaaactttacacagtaataggtgcctgcatcctcactggagacgttttgcagaagaatgctgaagtcattgttggaggcctgcaccgctgtctccttggggtgggagatgcctccaaagttgtaaatggcctcccggctcagaccagctccctggaaccacctgatgggtccagggggaccgtctccaagcactgtgcagttcagaaagacagtgtctccagtggtccccaacaccaattcctggggctggatgatccacaggtctggttcagggtccccagctcctgaagccaaagaggaggtccttgttgaattccctctcctcttccatcgttcactcatttcctacctggtgttttccctcccttccttctttccagatttcttcactcagccactccttcctgctttctttattactcaccagttgactcattcagtaaaaaagctctgagtacctactacataccaatggtaggattggggaacatgaaactcaggaagacacaagtgcccggccctgaagccattctctgtcttccagtggagatggtcaaaaaattgcccagaggcggaaacccagaagatggcaggactacagaggaggcaccatcatagctcggaagaagccagtgaagccttcctgaatctggcatcaagttaaaatgaactcccacgtacagatactctccatgtcaccagtttatggggtgtttccacaagcatccattctatttaatcacccgaatgacccttgaagtacaaattgttttgcctgtttttcaagcaaagcacttgaggcatgtagagccagggtaactgacttaagaaggaactactattcaatgacaggcccaggatttgggtattcaggtcaccataggtggacttacagatgccatgattgagtacttggggagtgtggtagatgacatgatcagcctcaggttttgactctgtgcttgtaatagggtacatccacactcttacctttggtgcatggtggaagactattcttccttgtcccttgacttggagctgagccatgtgacttgctttagccagtgggctgttagcagacataatgtgagtagatgcttgaggtgtacttgaagagttgggactgggcttctgcttctgccatctttatgagaaaacatgccccacatagttgctacctctccagcctgggctctggcatgagacatgaggagtggaaccacccagccacatgtaaatgtgcatgtagagatacaaatatgtattgttgtatgccactgaaattttgtgtgatacagcatgatacagtggataaaggtgactgtgcagggaaacagactggagcaaatgtgtggtctgcagggcctgatccttacccttcacaagcactgaggtgccttcatccgatttcatttctgagtgttcactcaaaccatcaaacctcacacagtggtaggttccagtgtgctccctggtgacattgtggatatagatggaataatcacaattcagtggttctgatgtccgttggatcatgggcattaccccagggaaggagccacgtttaaagttataaatttcctgttggtcctgagtgctcaccttcacccattttatcataccatcagtgcaggagccgaccaccatacacctcagtagaagtgtctcaccttctgccaccagcatggggccctcgggctgtagcacctgccagtcattcctgctgctctgcccagaggcatctacaaaagaggaagaaagaccttgcactgggcaggaaggacttggagccctaaatgacaagcttaaaacaatcaaaccattatctggccaagaacaatggcccaggataagacaggagtgtcattagacagggaagggaaagaggggatgagatggctggctgcagagagagaactgagctatgcaatggcaaacctacaaacaataaataacactcaagtgctcaccgtgtgctgggccctgcgtgcatgatgtcacttattcttcacaatgcttctgtaaggtaaatggcatcattcccattttttgacagaggaaactgagggtccggaaaggttaggcagctgtcccaggatcatcggctaggattgtgtctcccgaatgcacatgttgatgtcctaacctccagttcctcagaatgtgatgtatttggagatagggtctttaaggaggtaattcagttaaaatgaggtcattggggttgggccttaatctcacccaactggtgtccttataaggagaggaaatttaaacatacgcatgcagggggaagaccatgtgaagatacagggagaaggtggccgtctataggctgaggagaggcgcctcagacaaaccagccctgcagacatcttgatctcagtttccagcctccagaattgtgagaaattacatttctattgttcaagccgcccaggccatgctactttgttatggaagctctggcacactcagacatcactcagtaagagggtgacaggcttgattcaagccctctcaacctgtttctggagctctggctattaatcttcaaatgccacccttcagagacataggtttgtgtgttgcggggttcagtgtaaataccctttctgcctcatgtgaattatcagcagactgcagttcgtgttaatgtgttatgaagtgaggctattttgaagataggttgaactgttgagtttatcctcaaagtggatacagagaaagagggctgaggcctcccatggatattctgggtaacaaacatcatcacatgtattccttctaagaattctgtgaggtagatgctgttataatctcaattttaaaaacttccccatttattatttatttattttttaattttttttgtagtgatggggtctcactatggtgcccaggctggtctcaaactcctgtgctcaagtgattccttccccttggcttcccaaagtgctgggattacaggtgtgagccaccatgcccagcctataatctccattttcgagatgagaaagaaaacgaatgctcacagtggtaaagaaacatgaggtgaaccatgcattcagtagatatcgtgtccaggatttgaactcagatcaggtgacttaagattctgctcaactcaaggtcagcagctttgtaccccgagtttcctttttgtctgtattcccatcagcctttgtgaatagctcagtctcactccacacatttgtttgcagtatatcatggtgtttctcagttgtgaatgaggcaaggagagtaagaaggtgaagcaaacatttccttctaagagggtctaggaaagacttatggaattctaaattctatttctacctatcttcagctaggcatgtgctgttaaccaccaagaataactttctcacaattgtgaccaagtgataaccgcatgttgaatcctagggattgcttctgtccttgatgtccttagttccaagaaattcagcgacatccactctcaaacattatttgagctagtcagatctgttatcactgatccttcctgtttttttccctggcctcagggagtttcctcacacacacgtacaggactgtgcccatcactcagcacagggctaagaatggtgcctgttcccaccagccaaactggtaaaacccatgattgtcagggcactggggaaagtccacagaagagagatgcagcccagaaagaagtgttctggtccacccaacaaatcttaaaagcaaggccccaaactgattttaaaaaaaaataacattctattgtgaggcttctaacacatgtatatgtagaagttatgacatcgatagaataaagactgggagtggagaaatgtgagtttactactgtaagtttcttttttttctggtatccatcacctgagtatttattatttctatgtgttgggtacattgcaggtcctctttcctagctgttctgaaaaacaatacattgttgtgaattatagtcaccctactctgctatcaaacattaaaatttgttccttttatctaactgtgtgtttgtacccattcaccaacctcactcttaacccctctccctgagacccatcacctttcctagtctttggtatctatcattatagtttctacttccgtgagatcatttttagcacctgcatagttgtctttctgtgtctggctcactccttccttccttccctccttccttcctttctttcttcctttcttccttccttccttccttcctctctctctttctccttccctccctccctccctcccttccttctttccttctttttggagtgcaatggcactatctcggctcactgcaacctccgcctcccaggttcaagcagttctcccacctcagcctcctgagtacagcttacttcacttaacataataatctccagttccatccgtgttgctgtgaatgactacatgatttcattatttttttttcacggttgaatagtattccattgtgggtgtgcttggggacactatatatatgtattttttttatcaattcatccattgattgacgcttagattgattccatacatttgcaattgtgaatattgctgcaataaacgtagaaatgcatgcactcctttgatatattgatttcttttcctgtagataaatacctgttctaggattgctggatcatatggcagttctatttttagatttttgagaaatctccatactgttttccatagtggctgtactaatttacattcccaccaatagtgtataagagttcccttttctcctcatcctcatcattttttttttttttttgagagggagtcttgctctgtcacccaggctcgagtgcagtggcaccatctcagctcactgcaacctccgcctcctggggtcaagtgattctcctgcctcaggctcctgagtagctgggattacaggcacatgacactacacttggctaatgtttgtatttttagtagggacagaatttcaccatgttggtcaggctggtctcgaacccctgacctcaggtgatctgcccacctcagcctcccatagtgctgggattacaggcacgagccacagcacctggcctttttttgggtctttttaacaatagccattctaactgggataagacgatatctcattatggttttgatttgcatttccctgatgagtgatgttgagcatattttttcatatacctctaggccatttgtatgtcttctttgggaaatgtttattcattcctttcctttgctcatttttaattagattatttatttgtttgtttgcttttttaactgttgaattgtttgagttccttgtatattccagatattagtcccttgtcaaatgggtactttgtgaatattatctctcattcaggaggttgtctcttcactcttttgattatttttctgcagtgcagaagctttttagtttaatatagtcccatttgtcttttttttgcctttgttgcctgtctttcgaagtcttagccacaaaacctttgcctagagcaatgtcttggagtgttttctgatttctttgtattgtttttcagaattatcttgtatcttactgatcttccttagtatcgatattttgtgttctttttctgggattttgtaaatttcttcttgattgggatgtgtattggtataatagaccaagggcatagaatacatagaccaatggtataatagaccaatggcacagaatagaaaacacagaaataaatccatgtatttacagccaattgatttttggcaaaggtatcaagaatacacattcaataaatggtgctggaaaaactggatatccatatgcagaagaataaaggtagactgctatttctcaccatataccaaaatcaactaaagatgaattaaagatctaactgtaggacctaaaactataaaaactactaggagaaaacagggaagggactccaggacactggtataggtaaagattttatgactaagacctcaaaagggtcaggcaactaagacaaaaatagacaaatgggactatattaaactaaaaagcttcttcataacaaaagcaactatcaacacagtgaagagacaaactcttgaatgagagaaaatatttgcaaagtactcacctgacaggggactaatctaatatccaaaatatacaggaaactcaaacaactcaacagttaaaaaaaatctcattaaaaagtgggcaaaggacatgaatcaacatctctcaaaagaagacatacaaatggccaacaggcacatgaaaaaatgctcaacattactaatcatcggggaaatgcaaatcaaaaccacaatgagatatcatcttaccccagttggaacgactgttaaaaaggcaacaataaaaaaaaaaaacaaaataaataaacaaaccaccacaaatatatgctggtaaggttgcaaagaaaaggaaactttatacatggttggtgggaatgtaaattagtacagccactatgaaaaacagtatggagacttctcaacaaactaaaaatagaaatgccatatcacccagcaataccactactggatggccagtatggaatactatttggctataaaaacaaatgaaattctgtcattcgtagcaacatgaatgaagatggagttcattatgttaagtgaaataagccaggcacagaaagacaaacatcacatgttttcactcatacgtggaagctaaaaaaattgatctcatgaaagcagagggtagaatgataccagacgtggggaaaagtgagtgtagggagaggggcatgagagagatttgttaatgggtacaaacatacagttagatagaaggaataagatcctgccatttgatatcagagtatggtaactgtagttaacaacaatgtattgtagatttcaaaatagcttgaagagaggacttaaaatgttcctaacacagataaatgaaaaatacatgaggtgatggatatcctaaatactttgactcatttattacacatcctatgcatggaacaaagtattacatgaaccccataaatatgtacaaatgttatgtatcgattaaaaaagaaaaattggaaaatattttgaactgaaggaaaatgaaaacataatataaaaatttgcgggattctgttaaagcaaggggaagtttgtagtattaaatgcctatatttggaaagaagaaaggactcaaataaattacccactttccaccttaagaaactagaaaaaaaggccaataaactaaactcaaagtagtgaaagaaaggaaatcatcaagctggaaatgaaacttaatacagtagaacacacacacacacacacacaccacacacacacacacacacagaaaaaatcaatgagaagaagaaaatctttgagaagatcactaaaactgataaatctctagtcagattgaacagaggggacacacacagaaagaacctaaattattaaaataaggaataagattggtgatactactacagattttactcttattaatagaataataaaagaatattatggaaaacttcaagtcatacatatttgacaaattaggtaacatgaacaaattccttgaaaaagatacactgccaaagctttctcaagaagaaaaagacaacctggttagccctattatctattaaaaagttcaatctgttattaaaaatcttcccagaaataaaggtccaatccaagaaagtttcatttgtgaattttccatatctttttcttttcttttcttttcttttttttttttttgagacagggcctcactctgtcacccaggctggaatatggtggcgtgatctcagctcactccaacctctgcctcccaggttcaagcgattctcctgcctcagcctcctgagtagctgagattacaggcatgcaccaccatgcccggctaatttttatatttttggtagaggcagggtttcgccatgttagccaggctggtcttgaactcctggcctcaagtgattcgcctgcctcagcctccaaaactgctgggattgcaggcatgagtcaccatgcccagccaaattttccatatctttaagaaagagataataccaattttatacaaatacttttagaaaattgaaaaaaggagcatacttttctaattattctatgagtcccagtgttatcttgaaaccgaagccttttcctttcgagaaaggaaaatcaatatctctcatgaacatagataaaaaattttacacaaaattttagtaaaccgaattcagcaatcagcaatatttagaaagtataatacattataatcaaattgagcttatccctggaatataaagttggtttaacattcaaaaatcaatcaatgtaatttaccatattactaaactaacacacacacacacgcatatacatgcactcatataatcatctcaacagaatgcagaaaaagcagttttcaaacttgaacatgcattcctaataataactctcagcaaactgggaagacaaggaaggtttttcaagttgataaggggcacctgtgaaaaccctacaacaactctatcaagcttagtggtgcaaaaatcaatgttttccctgcagatcaggaactagacaaagatgcctgtttttactatttctattcaattttgtaggataggtactaactgtgaaaaaggtagtaggaaataaaagacatccagatttgaaagaaaaaagaaaactgtctttatgtgcatatgacataattaaaatttaaatgaaaatttcttaaaaaggctactagacctaataaatgagcttagcaaggtggacgataaaagatcaatgtacaaaattatatgtattactatacactagcaataaaccacttgaaattggaattttaaaatttccagtcatcaatgttataaaaatagaaaatatttagccaaaaatgtaaaggaactgcaaactgaaaatgtataagccattgctaagataaaaaaaatcaagcctaaataaatagagaggtacacactgttcatatgttggaagattcaatattgcttagatgtcaattcttctcaagttgatatataaactcaatgccattcccattcaaatcctagcaggcttcactttagcattgataaactaaatctaaaatttatagaatagccaaaaccatttgaaaaagaataaagttagaaaactaataccacctgctttcaagacttagataatgttacagtaatcaagacaatgtggtattgcacaaagatagataaacatatcagtggaactgaatagagagtctagaaatagtccatgcaaatagaggcaactgattttttaaaaagagatgaggtctcgctatgttttccaggctggagtgcagtgctattttgggtgtgatcgtcatagcacactgcagcctcaaactgctagtctcaagcaatcctcctgagtagctaggagtacaggtgcatgccatggctcctaactataattatttgatatttgacaaaggtgcaaagacaattcaatggagaatggggagttttttcaacaatggtgcaagaaccattggaaatacatgtgcaaacaaatgaactttggtttatatctcaaactatataaaaattaactcaaaatagatcatataactaaacataaaatgttaaacgatacaacttctagctgcaaacatggaaaaaaactttgtaactttgggttaggcaaagatttcttagatgtaacaccaaaatcatgatccattaaagacaaattgatgaattggacttcataaaaattaagaactcctgctgttcggaaaacacttgtaaaagaataaaaagacaagtcacagagtaggagaaaaatctttgcaaagcatatatctggcaaaatatttgtatccataatatataacgaactctcaaaactcaataataagaaacacacttaaaaaatgagagtcgaatagacacttcaccaaaaaggatgcatgatgtaaaaaatgttcagcatcattacatattagggagttaaaatcacagtgagaggttggtaatcctaggacttcgggaggctgaggcaggcggatcactggatcccaggagttcaagaccagcctgggcaatatggtgaaattttgtctctaccaaaacaaaaaaactaaccaaccaaccagacaaccacaaaaattagctgggtgtagtgatgtgcgcttgtagtcacagttatttggtaggctaaggtgggaggatcgcttgagccagggagatggaggttgcagtgagctgagatcaagccattgcactccagcctgggcaacagagtgagaccctgtctcaaaaaaaaaaaatcacagtaagatattactatgtacccattagaatgactaaaattaaaaagattgaccataataagtgttggtgaggaggtgtaggaactgccatcctcctacattgctgatgagaatgtaaaatggtacaactcctttgaaaaacactttggcagtgtctgaaaaagttaaacgtatggcaaccatatgatccattttattctcagatatttccctaagagaaatgaaagtatatatccacacaaagacttgtacatgaatattcatagatgctttatttataatagccctaaactgcaaacaacccaaatgtctgtctacaggtgaatgggaaagggtttatccatacaatggatagacatgagaagaaatgaactattgacatatgcaacaacatgaatgaatctcaaaataattatgcggagtaaaagaagccagccaaaaaggagtataactgtgtgatccttattatatacaattctagaaaatgcaaactatagtgacagaatacagatccgtggttgttttggagacaaggaggagtggcaaggacgaatcacaaggaaacttttgggcgctggatatgttcatgatgctgattttggtgatgatttcacaagtgtgaaatacacccagcactcacaaaaaaaacttatcaaattgtgtactttacatatgtacggtttaatatatgtcacttacacttcaatagagctgttaaaaataaattatttgtaaagatgaagcctgcgtgtgtgaggagaaagaagcaatggaggagaggaagaaggaagcactcagaaagtcttatctcagctaggggtgagtctggggaagtgaacaccagggaagaagctggagcctggactcagtcctggtgcccacaccccttccctccctctccccttctgagtccccttctgtgttgtcacttgggctttaggaggtgtcctaggaggtttgcctctgccttgtcagtggagctggaccttctcatctattttccatctgcatcctctgcctttcatggttcctgtatggggctccctttaaaagccttatagaaaatgtgttagccccagtctcctctactgcaaaataggggcactcatatttttctcggggctgctgtgagtattaaatagagaagtggtgaggctcaatcctgggccagctacgtaatttgtgaggccaagtgcaaaacgggaatgcaggtcccttgttcaaaaactattgagcaacacagcagaacattaaaccaagcatggggcccttctaagcaggaggctctgtgccactatatagagggcacacccaagaaccagccctgactcagcttgagatgcagctggactcaaacattccaactgactggtttaagcaacttctcttattttccatctattctattgcaacaatcattgggaatattttttattctgagtagtttagatttctgatttcctagtctagtgcctaaaacatagcagacactcaaaagtacctgtggaatgagacctagcaattatgattcacatcttagaattgaggaaatcagcttagagaattgaagtggtgtcttgagtcatacggccaatgagtaagggagcacctaggtccgaccccacacctgggttctgccaggatctctcctggggatggccaccccggaggaccaaagatgtcatggacagaatctagatctcagtagagcctggagcagaggcccagatgggcaggagatggaatgagcccactgagagccaagtatccctgcctggtagatcagagagttctggactcagaggctgagctatatattcaggggtctcaagactctggagctaacctggcctgcccctgagttagaggaaacatgggaatgataataataatcgccaagagttatcaaatctttgttatgccaggcacttatgggtattatcttgttaaattctcctaagaaagtcccaaggtgggtcctatttttagctccattttacagttggaaaaactgaggctcagaaagaaattacttaaactggttagtggtgaggtttgagcctactgcgtcttaagctgagccagggctggttcatggctgtgccatctatgtagtcgcacagggccctgtgcttagaaggagcccatgcttggtttactgctctgctgtgttgctcaatactttttgaacaaaagaccgcagttttcattttgcagtgggtctcataaactatgcagccggcccagggctgagcctcaccacttttctatttaatactcacagtagccctagagaaaggtcccatgagcgtccctgttttgtagaagaggctcctggggctaaaagagctgcagcatctgacgtgggcataggagcaatcaagctggaagccagtgggtgtgagcgcagagcctgggagcttatcacttcactacgctgcttcttgggacactgggggtgccctctgccggagtcaggcaaattttcagtggacccctctttactctatcttcatggggtcaagcttcttcaggcatggcagagcacttagtgcccctctagggactgaccagccgggggtggaccctgttctatcctagaccccacttacctgaggggacaaggaccagtgccagcagcaggaagcagggaggcaagtgggccaggcaggtgggggccgacatcgtggagcacatggcatcttctgtggtccccaagacttggggctcctctgctctcttgtgagtgttggagtctgaggcggggcccgtggacaaggcagtttctgcgtctcttggccacagctgcttggggaagtgttttcattgcagcaacacaaggctgttggtgcaataggaaggagcccggtcaaagggtttcctgcttttgtgtctgggctgtgattcctgtagtcactgtgctaaaaccttgccataggctccatcctaggtgcccgggagggaggtgggcactgaggtcataggacgcactccagaatcgggtggaatttggagcaaacattggatcttcctcttcttggctgtgcaagatttcaaagtcacttcccatttctgagccttttgtttcttcatctgcagcgtaggaacaacggcagttccctcctcagaacagttttggtaagattatgagaaataatgtgagggcacagaacaatgtaaatgctaaacatattaaccattattattcatgatgtgcagaaagtagaggaggtgacattgcttaagaagaaggatttattataaagcaagccccatgggggcctccttttagcactgcagggagggtacaggcctaattcctaaaagtataatcatgtgtaactctctcagcctctgtttcctggggtccaagtgaaacatactcagattgtgcaaacatttgcgtttgtggcatctttgtttcctgtaagtgatctgaacttcctcaggagcctcctggtgctggctatcaagaaggaaaagcttaatcttgccaattcatgcaatccaggcaatctctttagccacactgtctgggttcaaatcttggctttactcagtctggctgtgtgaccttaggacaatcatttgaccactttatgcctcggtttcctcatctgtaaaacaggaataaaaatgtggtagcatgtgtggggtggagtaagcactctataggctttcaccattgtcttttaggttaactcagtcttttaattaactcagggaaaagtacaagaacaactcagcctttcattatttcacttcctccctcatgcttcagaaggttctgggtgcagaggaagctgaagattctccagcaacagggtggcaggccttggatctgagtatgtcccctgggtcccagaggtctggtgtctactatgaggaggttagtctggcctggtccccaaggactttgcactgggtctgtgactggtcttttctagacttttgaggccttgcattgatacccctgctcaattccattactccctctacttgttctcctgtcaatgagatctatatagtgaaacttctttgaaagggccacaagcctagatgattccaccagaccctcagtactttccatgtcattcttacacgggaatttctgaatcacctgctcatctatgcagatttctttctcagctattgtttttttctaaagttttacttacaaataattttattttaataggcaaggcattgtattggttagctattgctgcataacaaagcaccccaaaatttagaagcttaaaaactaaatgttcagttaatttactattttgtgggttgacaattcagtcagggctccatttggtggttcggtcttctcatctcagcagattttggctgggaatgttcatgcacttgaggtcagctgcaggttggctaggtggctttgttactgcggttgactgattgttaacccaggtacctcagctgtcctctatgtggtctctcatcttccaggacactaacttagtcttgttctcatgaaaggggcagttttgagagacagtgcaaggtacaaggaaacttctgccatattcttttggccacatcaagttacaagaccagacaagattcaaggaatggaaaatagactttgcctcttgttagggaactgcaaagcctaattgcaaaaggtgtggatacaaagagggggtatagaattgtggatatttttgtgatttatctgccatgggcatctacaggtacaaaattcagaggtctcagtgtctcatttatagggctcccagacattactttccttagggttaaccacagtcaccagtttttgaagacattcatttcctttactgtttctgatctagtgctcagaagccaggttgaatatggtttctttgtgatgtcgtggactatgaacaccctgggaagacaggccatgatcccttatgctgtaggaatccctaaactccattcccaccccaccccagcatttggacctcaggactgtggggttggcaggactctagcatctcaacccctgtcttctccctctttttcttacttcctcaccaagtcataaggggaggagttccccttcttttccttctggtagggactttcctaatctcagtcttcttcctaacagctggccttctttgttctagatggaatccctcctgccccttcctcaagacagcaagtctcacactccagcttagaataggaaaaaagcttccagggaaggaattaaactgctgggaggtggagaaatgcaaaaggaaatagttaaaaatgttatatctgtcacgtcatctataaaacacatgaaatgcgattgcgcgtgaagcactggcttgcgataattgctcagtaactaggaacagtggcattcctcctggtcagtgtgcttgggtatcacatgaactatagtgtctattactagcctgagttaagttatcctcaacaagagcacccgaggtatatatagaacacaagtctacccataaagctttttttccttccactacaaaaatggaactttgttaaaacaacagctttttgattgtttaccataaaatggaaaacatactaagcaagcacagggaaagcgttcaaccttagcagcaatcaagtaaataccagtcttaaaaagagcaacactggtgtctttgcaatcagcatctatctccactttttctatgctctcctctttttttggaggttctaaaagcctaagaactgcattttctgtaactctttaccatcattattctaggagagaataatgaaccaaggagaggttcttgcttagatttggaaggtaaaaggagaggcatgcttgcttctctagccatgaagagggggcagatacgtgagaattggtggatttaatttatgcaaatgtgaggttttgcagtgctgcctgtcttctataaatcacctctaaagcacaggcagctggcatcattagcagcagtttctgtgagtctctcagattcctgattttccaagagctaccagtgaacttgagagataaagcagtgaggatttccgatggtctgtaaacaccaaatgccacaagtcccatgagaaccaagcatggctttttatgaccgaacacaaaagtcatccagcctcatttcttctcttttcatttaggaggaagcatttagtgtctcaatactaaagtctctaaggtcctcgaacttgattttctgctattggcaatttgtcctgccttgtggcttggtttgcctttcttactcccttttcctgtttcatgtcaaatcccatggcttgctttttggtgtttttgttttaaatttttatggagttctgacttacatacagaaaaaggcacaaacatttaaatgtgcagttcagtgaatttttagacttttacatccatatacatctgtgtaataaccaccccaagatgtagaaagttccttcttgtttcattccattcaatctctggccccagaggcagccacctctgatttctatcaccatagattagttttgcctgtttttggagtctttaggtttttccaaatataagagcatatcatctgcaaacaaggataatctgacttcttcctttacaatttggatgccatttttttctttctcttctctgattgctgtagctaggacttccattactacactgaataacagtggtgaaaatgggcatccttgtcatgctccaggtcttagaggataggctttcagtctccctcattcagtacgatactagctgtgcgtttgtcatatatgggttgtactatgttgaggtatagtcctcctaaatccagtttttttgaggatttttttatcatgaagggatgttacattttatcaaatgctttttcagcatcaattgaaatggtcatatggtttttgtccttcattctgttgatatgatgtatcacatttattgatttgtgtatggtgaactatccttgatgcttgcatcccaggaataaatcccacttggtcatgatgaatgagctttttaatgtattgttgaattcagtttactaatattttgttgggattttttgcaacaatattcattagagatattggtctgcagttttcctttttctatgtgtttttatgtggttttggcatcagggtaataccggtctcatagaatgagtttggaagtattcgctcctcctctattttttggaatagtttgagtaggattggtaatagttcttctttaaatgattggtaaaattcagcagtgaagccactgtttctttactgggagactttttattatagcttcaatctcgttacttaatactggtctgttcaggttttggatttcttcatggttcaatcttggtaggttgtatgtgtctaggaatttgtttattctttctagattttccaatttattggcataaagttgctcctaatgatgcttggaatttctgcagtatcagttgtgatgtctcttttttcattgctgattttatttggatcttcttgctttttttcttagtctggctaaaggtttgtaaattttgtttaacttttcaaaaagccaactttttgtttcattgatcctttgtgttgttttatttccatttcattgatttctgttgtgattttttttttttttttgaggcggagtctctctcagttgcccaggctggagtccagtggcatgatctcggctcactgcaacctccgcctcctgggttcaagtgattctcctgcctcagcctcccgagtagctgggattacaggcacccaccaccacgtccagctaatttttgtatttttagtagagatggtgtttcaccatgttggccaggcttgtctcaaactcctgacctcagataatctgctcgccttggcctcccaaagtgctgggactacaggtgtgagccaccacgcctgacctctgctgtgatctttattatttcttttcttctactaattttggatttggtttgctctttctttttcagttaagatgcatcattaggttgtttatttgaagtttttcttcttttttgatgtaggcactaatggctataaactttaatactgcttttgctatatcaagtttttgtatgttgtgtttccattatcatttctttcaatatatttttcaatttctttcttactttcttcattgacccactggttattctggagcatattatttaacttccaagtatttgtatagtttcctaaattcctctgttattaacttctagttttactccattgtggtcagagaagatacttgatattatttcaattttttgaatgttttaagacttgttttgtgacctaatatgtctattcttgagaatgacccatgtgctgagaaaaaaagagtattctgcagctgttggataaaatgttctgtaaatatctgttagatccattggatctatagtgtacattatgtccgatgtttcgttgctgattttttgtctggaagatctgtccagtgctgaaagtggggttttcacatcttcaactattgttgcactgggcctttctctctctttagctttagtaatatttgctttatatatctgggtgctccagtgttgggtgcatatgcatttaaaattgttatatcttcttgttgtattgacccctttatcatcacatagtgagctttgtcttttcagtctacacgtgtctttagaggtgaaatggatttcttgtaggcaacaaatcattgggcttttttttttttttttttttttttttttttttttaggtgttatctcactctgtcacccaggctggagtacagtggcatgatcttgaatcactgcaacctccgcctcccgggttcaagcaattctcccgcctcagcctcctgagtagctgggattacaggcgcctgccaccacgcctggccaaaagtgctgggattacaggtatgagtcactgtgcctggcaggcctttttttttttttttaaatccattaagccactctgtgtcttttgactggagagtttttagtccatttacattcaatgttattgataagtaaggacttactcctgccattttgttatttgttttttggttgttttgtagttttctctttcttctttctttccttcctgtcttttttttttgtgggtgaagatgagcttttctggttatatggtttagtttcttaatttttattttttgtgtatctgttgtatattttttggtttgaggtttccacgaggcttgcaaatactattttgtaacccattttaaagctataacagcattgtttgcataaacaaacagaaagaaaattaatcaagactttatgccttaacttctccccaccccatttttaactttttgttgcttctaactacatttattgtaccatgtcttgaaaagtttttgtagttattatttttgattggttcaccatttagtctttctattaatatcagagtagcatatataccacagttacagtgttacaatattcagtatttttctgtgtacttactattaccaccgggttttataccttcagatgattcctcattgctcattaacattcttttttttttctgattgaagtactcctttaacatttcttgtaggatgggtgtggtgttgatgaattccctcagcttctgcttgtctgggaaagtctttatttctccttcatatttgaaggatattttcaccagatgtactattctacagtaaaagctttttttccttcagcactttaaatatgtcatgccactgtctcctagcctgttagatttcccctgaaaaatctgctgccagatgtattggtggtctattgaatgtcattttttcttttctcttgctgcttttaggatcctttctttacctttagataaagtttgattattaagtgtctttgggagtttgattattaaatgattattaagagaagacttgaggtattcttctttgggttaaatcttcttggtgttctataaccttcttgtacttggatattgatatctttctctaggtttggggtgttctctcttattatccctttgaaaaaactttcgaccccatctccttctctacctcctctttaaggccaataactcttagatttgccttttggaggctattttctagagcatgtaggaatgctatattgtttttcattctttttttgtctcttctgactgtgtattttcaaataatctgtcctcaggctcactaattctttcttctacttgatcaattctgctattaaaagacactgatgcattcttcaatatgctaatggcatttttcacctccagatttccgcttgattctttttaactatttcagtctctttgttaaatttattgatataattctgaactccttctctgtgttgtcttgaatttctttgagtttccccaaaacagctattttgaattatctgtctgaaaggtcacatatctcctttctccaggatgggtcccaggtttcttatttagttcatttggtgaggtcatgttttcttggatggtgttgatgcttgtaaatgcatcttcggtgtctgggcattaaagagttaggtatttattgcagtcttcttagtctgagcttgtttgtatccatccttcttgggaaggctttccagatattaaaaaagacttggtgttgtaattgcatctatttctgctttaagaggcactccaagcccagtaacactctggttcttgcagaccaatagagatactttcttgataacttcttttggacaagatccaaaagagttctctggattaccaggcagagactcttgttctcttcccttattttctcccaaatgaatggtgtctctctatctgttttgggtcacccggagctgggagtggagtgaaacagcagcctgtggccaccaccgctaggactgtgctgggtcagacttgaagccagaacagtactgagtcccaaggcctgctgtaaccactccctagctgtggcctatgttcactcaatgccttggggctctataatcagaaggtggcaaagccagccagacctgtgttctttctttcaggatggcaagttcccctcaggctctgggcatgtccagaggtgccatctgggagccaagaactagagtaaaaagccttagaaatctatctggcattctatcgtactgtggctgagctggcactcaaactacaagatccagttcttcccactcttttctcttttccaaatgcagaggagtctcaccccatgaccaacaccaccacaagcctatagggagtattgccagactaccgccaatgttcctttaaggcccaagggctcttcagtcagcttgtggtgaatgctgcctggcccggaactcacccttcagggcagtgggcttccctctggcccaggataggtctagaaatgctattcaccagcaaagtcctggaactggggaccccaaaaaaccacttaatgctccaccccactgtggctgtgctggtacctaacgtgcaagacaaagtccttcatattttttccctctgtttttctcaagtggaaggagccttgcctcatagccaccacgactgagtggtgagtcatgtgctgagtctcacctgaaccagaaagtctcacccaagtccctcaacgtagtacccgggtattgctgctggttattcagggcacaatgtctctttagttagcaggtgatgaatgcttccaggagtgggatctttccttcaaggcagtgggttcccttgtggcccagagtgtgtcaagaaatatcatcctggagctaggacctgaaaaggggcctcacggtgccctatcctgctgtggttgagctgatatccatgtgggatatgatgaggtttctcttcaaatagcctgatcaatcctttattctttaattcatagtacctccccacccctttttcacttttctcttttttcttcctttctgtctttgtcacatgcccagacacgccacagtaccaggtgttatcagtaccagctcacattcctttccttatttggcaagaagacttgctctctagctcactgcagacaccccttcccctttcgcctctcttccttacataccctccttatccgaaaaaaagttcaaatgtttagccaaccagggttaatttagattgtactgcctgaccatggccaatggggaaagggtacaggggcaggacttgcttcaggaataaaggctcttgttcaagtgtgctctcatggtgactggccaaggagaagcacccctctgtgcagaagtaaaattgctttgctaagaatccttgtttgagtgttcaatttccttaggattttgagcattattcccaacatccaagatgcaagacaaagtcctcctcattcttccctctcctctcctcaagtggagggaagaggcctctttcgtgagctgtgcagcctggggttaggggaagggtgatgccagcaccttcttagctgccctggcttgtgtctcagtaggttgcatgttccctcagtccactgtctctgggcccagttcagcactagaacttgcctaggagttgtagctcttggagcctagactgcctttcaagtttatttagagccccagagtactttagcccacagtggtaaggcttgcaggaactgaagttcagaccactgagattggattagcaattcccctctggctaaggctgtttaaatgctccctctttgggtgggtaacagctgagtttggtcccattttgttttcttttataatagggcagcactgagttcaatgcttcacaactgctgtgatctccctttccccagtgcacagaaatgctctccacaccatgctgccactgccaggggttaggagaggggtggtgttggctattcaagactttttttctacctcttcggtgcctctttcagtgatatgaagtaaaaccaggtattgtaactgctcatttgatttttagttcttatgaaggctcttttatttgtgtgtacacagttgttaaattagtgtccttcctgggggagatgattgctggaggcttctattccatcatcttgctctgttgtttttatgttttctcatttatctcttttaactgaggtatttatttgcctttaaagtaattactgacatggaaggacttactattttcgttttgttacttgtctatatatatggataatacattcaatatattttaatatgtcttgtccagtggtttttgctccttttctcctttgctgccttcttgtatgttttgtactgacatattttgattctcttttcaattctgtttgtgtatacagacagtacctgaatgtaagcccagcataagataaaaagttcctatgatttacaatggggttatggtttctactaaatgtgtattattttgcataattgtagagttgaaaatttgtaagttgaacataagtcagggacagtatgctgtgttgccagcatcaaatgcaattttgacttacaatatttttgacttctgatgggtttattcttatgttatcccatcataagttgaagagcattggtattctattcatattttatttgtcatcaccattgcaactacacaaagagacttaaagttatagcaagatattttaaaccgataacaacttaacttaaattgcatataaaaactctacttctttacttctctgccctctttatgttactgtaacaaaacaaattacctctttttatattgtgtattcatcaacatagatttttagttacttcccatgctttcgcttttaaaattctataccaaattcaaaagtgatttatacagctatgttacaatacttccagattttatatttgtctctatgtttatgtttacctggtagatttatacttttgtatggctttgtgttgccattcatcatcttttcatttcaacttgaaggattcctttcagcacttctttcagggcaggtctaatggtgatgaattccctcagttttgtttatccaggaaagtcttcatttccccttcattttgaaggcagtttagtactatatagtattctttgttggcagttattttttctctcatcacatcccactccttctagcctacaagggttctgttgagactttagctgatgatttaataggagctcctttgtatgtgacaagttgcttttctcttgctgctttcaagattcactctttgtcattttttttttaaaacaaagtttccctctgtcacccaggctggagtgcagtggcgtgatcacatcttgctgtagccacaaattcctgggctcaagtgatcctcccacttcagcctcttttctatttttgacagtttaattgtgtcttagtgtaaatgctgttagattcgtcctggttggagcttgttgagctttttgaatttgtatgtctactttttccctcagattagaaaaatttccagccatcattttttttaaaagtctctgtggtgccttctctttttcttgtctgtcttagattctcatagtgtgtaggttgttccataatgttacacatagtgtcccataagtttcttatgctccttttacttttcttagttctttttttctcctttgcttcagtaatttcaaaactcctgtctttgaatttgctgattctttcttctcttggtaacatctgttcctaagcccctctagtggatttttaaatttagttattgtattctgcagttccagaatttctgtgtggttcttcttcatagcttctatctcttttttgatattttctttttgttcatccattgttttcctgatttcatttagttgtctgtctgtactctcttttaattcattgaaaattcttatgattattattttgcatttttttggtcagataattcgtgtatttttttggggtcagtttctagagatgtaatgtgtttctttgaataggccatgttttcctgtccctttatatgtcttcttatcttctcttggtactttggcatttgaaaactcagctaccccgtgcagtctttgtggtctggttttctacagggaggactttctccaatcagcctggctagagaatctggagacctgtcaacccttctctgggaatgcacccttttgggacttagtgtgtaatcacgtaacggaagaggtctttctattgaagcgctccctctagtgtctgcctatgatgctgcggtctggctggtgctgcagtaagccacggtactgaagttccacctagtttctgtctgtgatactgcagactgatgctagaacaaactaatagctccacctattatttatctgtgatactgcatattttggtgctagaccaagtcatgttgatcatcttcgttttcagtggcctcaaacctggtcctcattcccgtcagcatttaaattcaggcaagatggaaactagtcctttggcagcaccccaaaaagtcaaaatattggatcaatgttccactcctttcccctcccaaagagaagtcaggagttggggtttcttcccagtttgcatgattattaatgctactgagcaccttataatatttaacaaagttttttttttttcccaataaaatagtgcactttctcagggccatgctgggtactttcattaaattaatacttcattttttacttcactactcaacgtagctgagcagtttccagtgtacaacacagtgacacaggtttcccttgtccaggacttagaaattggagctagatccctccgtcttgctccttggatctatcttccaccccaggtcctatgtagcccggctccacttggagtgggatttctttcaatcaccctggttgtataccctggtcaaggtcagccttagtcttaggtcttttatcagtaaggaagcaagtcctcttctgtccgattttctacgtgatgtaattgatctgagctgtgctgtttcgtgagcatttatctggtagtctcccaacatcccgggaagcaacacctccctaaagcagcctgaacacctggattccgactattttttgtgtctgttaaatatttttaggcttccttttgacatgcctatgtatgcagcgcttttgttctcaccaaatattcaggcatcattatttcggcagcagaatgtctagctaggaaggacctaaacgccttccccacaccgtgtgtgtgtgtgtgtgtgtgtgagagagagagagagagagagagagagggagagagatacgtgtgttatggcgagtgtgtgttatagagagggaaagagagataaatgtgttatagctgcagtggagcagaaagacctctgcttctggtcagggggatctgggtttaaatcctgcccttggcctgatgaggtggcaagaatatgggcaagtcataaatcaccccagccttagtccttagtttcccctttcctctgctccagaggtggcagtgagagaaaagaagaatggaagagcaaggtggaaaatagccaagaagcccaccatcactcatattgaatgagagattgcaatttttattacctgaataataggtaccattactgcctcttaggaggaataatttggcagatttgaaagggcagtggtgaagaagaatgaagcagctttctgcttcaaccctactgagtccagcttgttcaataaactgggtacagggacaggaacacaaagggagactgttcaacaagtttgggtaaacttgacttggaaagaaattggggaaggttgttgttattttgtatgggcttttcctttctcgctcgtcttggtctgccatgttagtagcctttgggttcagcctcccagcaccttgttctgtgtgctttatcctatacacaggagcatcccacaagtagggttggcagtaaagttggccaggggccaccgatgtgggtggactggatgtggccagtcatggtgcctggggcctcaggctctgttaactggatttatcctaagaagggaggggcagggcaggagagtgcttggagccagagagaagatagagaatttcaaccctgttactcagaagaggtgaagcaaagggcagctctttcttcactttccctccctggaacctggtaatgacacatgacaatgctccacatcagagaatgcatctttcaggagccagggaaatggtagacattgatcagccctgggtttgaggccagaacaagcacacaaactccttcttactatccagtattcattgctaccttcccaaagagtgattttcataaatattgtgataacttctagccacagatcatgggacaagctattagagctggcaggactaaggaatgttctctgcagccctagacctaggggctctctcttctttctccccctctgtctcctgctgtctattcatccttctcttcatttctgctctcaccccaatatgagagattgtagggtgtagtcactgattcattcaacaaatattagcatgcgctatgtaccagaactattcttggtgcttaggatacatcagtgaataaggcagacaaaactcactgtccttattaactgaagtacacatcccaattggggaggcaggcaatacacaataataaataaagtaaataagtaaatgatatagtatcttagaaagtgataaggcctgtggaaagaaatatagaccagggaaagggggttggggtaagcaggtggtgaggggctgtgagggccaaggtaagaactttggctttacttgcagtgagatgagcagctgtagcaagttttgggaagaggtgggacatgatctggcctttgtttgaaaggattcctatgctggctatagggagaccagtgaggggctaatggcagcaatccaggaacgagaggatgaagggtgaaatctggcaatggggatagtgagaaatagtcagattctgaatatattttaaagctaatgtaatttcctgacataaagggagcgggataagagaggagaggaatcaagcatacctcctaggtttttggctcatcagctggagagatggagttcttatcagccgaaatgggggagtctgtgggtggagcagagttttgggggataagcagaaggccagattttgggatgtaagctttgagatattattgggcagacaaatggagctgttgagtagacagatggacatgaaattcatgggggaagtcccagctggagaaataaatttgagtccttgagctatatttcaatgatatataaggccattggactggacaaaagtatcagaagagagtatgtggtagttaggaacaagggagtttgaaccagactgcctgggttcaaactccagccaggcacttaggagctgtgcaaccttggacaagtcaataaaattttgtgtctcattttttctcatttgcaaaattaaggtaagtataggttatacctcatctggttgttatgagagtaacgcagtttataacacggaaagtactcagaacagtctggcacacagcacgctttcagtgtatgtcagctacctatctgttttgcagcagatatgaattgctccataatacctgaatattacttaattacagtttttttggaaacaatcttcatctggtagaaaagttacaagtgtgggataaagagcctcttttcagaaacatctgtgaataaattgctggcatattgccttatcgtccctggttatggcttggatgttggtatctccccaaatccacatgttagcacctaatagccaatgtgatggtagtaagaggtagggcctttggggagtgattaagtcatgaggaatccaccctcatgaatgggattagtacccttagaaaagaggctcaagagagctcctcagccatcttttgtcatgtgagtacacagcgtttatcccctctgccatgtgaggacagggagcaaggtgacatcttggaagtgagggcaaaccctcaccagatggtgaacctgctggtgccttgaccctggacttcctagcctccagaaatgtgagaaatgagcttttgttgtttataaattacccagctaatggcattttgttatagcagcccaaacggactaagacacccctgaatatctcagtgcgtatttcctacaaataagaacattttcctgcatgaccaccagaccatcaaaatcaggaaattaacataggcacattattaccatcttatctttagattccctacaagttttgccaattgtttcaataacatgtttttatagagaaaggatccagttacatttagttgccatacctctctagttttccttaatatagaaaaaaaatctcctttcctttactttatgaccctgacactttttaaaagtataggccagttattgtgtagaatgcccctaattttgtatttttctaacacttcctcatgatgagagtcaggttttggcacctttggcaggaatatctggaagtgatgctgtgttctcattgcttccaatcagaaggcacacaatcggtcccattactagtcatgttcactttgattactttgtgatgtcttccaggcatttccactgtattcttttttcctttgtaataagcatgtaatgttaagatttttttttcttaatcctatgaaatccagtttgagcatgtgcctctaccatggttggagagaaagtgaatagcagctattttccatagctccccactccactcttggattggatcagggcaccggggctgttgccttccaagacaaaggagatgaattctggttctcagtctttatgggtcactatggccattgctctttgtccaggcctaactggacaaagtcccatttgaagttggccggttctactacctgctgcagtctctctatgacaagctcttccttggggatatttgatgaagctcccaaagttctggttcttgaagccaaaatcttctctggcatgaattcagcacctcacaggcctggaaatgtctagggctttgcatcctaggagggtgcagttttccatagctcactgaattcaccatccattttggaagatacccttgtttgggcctctgcacagccaaatgtccctcctgccttgctaacagaatagccattccacccagcaacagtttcagggaaacctaggcccttccccagccccaggagatgaatcatcattggtccaaggcagttatggcagccagtcccctgaggctgggacacatgttgagatgtgaaggggagttgtctggaggcttctggggaaaaaattcaagtagctcactgtctctgtgcacagagaatgaatatggtaaaacagacaaacacacaaataaacaaacaaaaaacacttgtatatggatgagtccaatatcacctttattaaagcatcacagaaactacaggttgtggattttgagctttagtttctgagaacaaggtaaataaataataaataagtctgaactttccttctatctgacttttttgctttttcttgccaagcctgagatcacttacatcagggactctggaaaaaaaatgagggttccgaatggttttcatgaaactcattcttttctctcttcccaccttttactaatggaagagtattagaaatttatagggataaggcacacagggaattggtgtgttttgcgtggttaatgcagacatctttttttttcttttctagctttgctgaggtataactcacgcataaaaaatgtatagtttgaagattcgagtatgttcacagggttaagattcactcgactttagcgtgtagaggattctgacgcatcgttataaaacatgcctgctggtgtcactgcagagctctggcagtgctgttttcaccaatgcctttccttcagtattgtatgtttgacagtggccaaattaggcagcagaaaaatgtgatgcatctgcctcatgggaggctgtcaccgcagaaacagagagcaaatgcacctttaagttgcaaaagctgagatccagatggaagatgcaaacgtttggaaaaatatgggctctgcagagccagccccttcctcaccacttacccctgacccaacctccatcttgattacctgagggggcattgcccagtttgtgggagaggggaggagtgcttgagagaaccaacattgatgggcccctgacaagagtactacaacctgctcccgcaaaccccaggtcaaatttggaggagctggggagttaggaggacttgtgtcttccttcctggtgacatggttcctggagttccagctcccagcctggcctggcagcagaagagcagaatgggatctatgctcaacttagggggagaggacctgagaccatcctgcagaatcttctgggggtgccagagtagtcacattttccagtgtgcttaagaagattatgggtggagctgaaatccaatggtgtggagaagctctgggatcagaaagaagttattgctagaagcccctgtgtggatctactgccaggagcttcacagggggcagacatcttagcagatacctgcatggactgatgtcaccaaggcaccttagacaccactggggatgcggaggctgggggaccccgttttgatggaggagatcctaaattgaccatgattaagctcatgggtagggtgtttaaaatataaattatgtaacaaacctgcacgttgtgcacatgtaccctaaaacttaaagcataataataataaaatttaaaaaaaagattatggagaagttttaaaaagtaatacttttgcacacctggaattgtggcttgagagttgtgttgttttattttgatcatatcacctaatacctttaggacacaatttccacatttgtgaactaggactggggagaagagattgtacaaagtggtaccaaaagctttaccagctcagattggctatgatgctaaaggtgcagtgggtcttagatgtctcattgctcaccttgaatgctttctgtctctgttactctctttgcaggaccttctcccagtttccattgaggttactgaagattaccaagacagaccagggtgacagggaacaagggggcatttccagcccctgcagatatcagatccttttcaccactagttcagaccatattttattatttttaaagtgatttgttgaagaaatatgccaacaactctcagtagatatgaaaatagaaaggaaaaatatatctataatcatgccgtcttgacaaatgaaagcattctgtctttctgctttctcttccagtccatgcctgcataagtattaatacttgttttgcaccagagcgtggagactgcattgtatcaaagggcttttgggagaccagaaggatggaaaaggaaaatctggatattttagctctgctgattggctgccctggcaacagaccaaatgactccaaaaataactctccagctctgacccgtctcctgaacttcagatgcatctgtccgtgtgcctacttaacagctccactttgatgacgaaccaacattatatttaacatgtttaaaatggaactgttaattcagttccattccaccaccaaacccatccctccacctgtcttcctcatctcatccattgctcaaccttgtcatgaagtcatctccaatcctccctctccattgcctttcacattcagtccccaagcaagtcctgtcacttccaattttaggctcacctcccgttagtcaatttctctccatctctgctggcaccacctagcttagattacccattgactctgggtttactgcaataacctcacatctgaattttctgattatttgctttccccttgtctacttgctccacggaagtcattgtgatttcttaaaatgtaaatcttgtatttgcttggtgtaatttgcaatctgggcagtgagacatctgagagtctctacctctgcaatgtcgtcccattgtttaaataaatcccaaagtctccactgtgaccagtatccctgtgtaatctgtctcctgcccatacctccagcattgtcccatgtcccattgctcacactctccagccccactggttccctaccatttcctgaaccttccatgctccttcataccttaaagtttggcataataggttccctccaacaagaaggtatttcccaggctctttgaaacttccagatgtcagcccaaatgttcctgtttcagaaaggctactagcttaccattctgtctagctagcagcacttcattattaactctgtgaagatctctatcctagcaatccccattatttgtgcactgtttttattttcttcagagcactcatcacatttgaaattctttcttccttcctccctccctccctcccctgtatcactcccacctttctttcctttctatctgtcctcatcagactgtaccctcaccacaagggtgaggaccacttttaccaatgcttactaatgtttgctcagtgcccacacagtgcttgaaatatagtgtgcgctcaggaatatgtgtggaataaacaaaggcatagccttctttgaaatgaacaaatgttcatctggaaactctggactgggcttccttaggatatgggtggtttccttaaaaggataggcaatctttatgttcaagttgtgacttttctggcagcttcatttttcctctggcttcaaggtatgcaacacctgggatatcctctatgtccttcttgatgtatgatttggggacatcctctatgtcctttttgaagtatgattgggggaatgaggaactagctaaagtttttgagaaaatgttacatgtatatatcacacacacacacacgtttttgagacagggtcttgctctgtccctcaggctggagtgcaatggcgccatcacagctcactgtagactcttcctcttgggctcaagtgattctcacatttcagcctcctgagtacttaacaggtatgtgttatcacacccagctaattaaaaaaaatttttttttgtagagaccaagtctcattacgttgccaaggcaatatatacccaggtcttgaattcttgttctcaagtggtcttcctgccttgcacccccaaagtattagggtaacatgtgtgagtcactggaaccccaagaaaatgttttaagaggccattttgatgtaaaggatggatgcgaggctccagagcaagacctggaaggaggctgttggagtgacctaggtaagtattgacaagggtctgggtgaccatgcagatgaacaggagaggacaggattaatgagacttggaaacttagggcacctagggcacaaaatgtagagacaagatgtattagtccattcttatgctgctaataaagacaacccgagactgtaatttataaggaaagaggtttaattgacttacagttcagcatggctgggaaggcctcaggaaacttacagtcaaggcagaagagaaagcaaacatgtccttcttcacatgacagcagcaaggagaagtgcagagtgaaggtgggggaaaccccttataaaatcatcaggtctcgtgagaactcactcactatcatgaaaatagcatgaaggtaactaccaccatgattcaattcaatcacttcccaccaggtccctcccatgatacatggggattatggcaactacaattcaagatgagatttgggtggggatacagccaaaccatatcacaaggtgttatacatgctgacactgcgcttgctcaggcctcagaatgagtgtcttactttttgtttcctaggaactttgcctcatcctagtcctggctctgcttcaagggggaggtaaattataattcttgtttcatgataccctcatcattgaagaaggccaagacatcctcaaggtcctcaacattggagcccaggaatgggaatattgaagctgaagcacctctattgtgagtagaaaattttgaaaaggagatgcatatctgagggagaatatctctgtttctgtgactataaaggttcaaagtcacagtaaaactacataataaaaatagagcaggatgtttatctcctctgggcatacttacccttttacaaaaagccttttctgtaaaaggcttttctggactacgtcatcttccaaagtcttcacagggccattttggtgcttataatgaaccctcgatctactccagggacacatttcaaacctgggaaagggcacacatgtgttcttccctttccctcaccacccataggcatcaggttggctttactgtagaaccgttggcctgacaggccaggaagcaatagattgaggatgggtgaagatcacccatctgtgtctagaatgctgggcaatgtggctccttggaaagcagtgacaagagttgggtttgaatctggatttcttggttctaccacttgttatctaagtgacattgggcaggtcccctcatctgcaaaatggagcatggtgcccaccttgtaagactggtatgaggatgaaatgagataaaaccacacatgaagtcccaggcccatggtggcacccagtaactgtttttcttccttatatggaactgtagaatgtcacaataggaagggaacttggggttctctagataatgtccctccatttatttttttcctttgaatcttaagtacacagaattgtacctatcataattcatgttgcatgatactataattattgacaatgcatgaccctttttattaatttgtttacctaccccttcatctatatagctgccctttggtcatttgttcacccatctgtctacccatccatccatccgtccatctgtccatccattcatccatccatccatctatcttccctcactccctctctcccttccaatcaaccatgcatctatctatttacctgcatacctatatcaattttatattgttaatctgtccatttaaaaaaaatcttaatataaacatttgtgaagccaccatccatcatgaaagctagaaccttcacgataatttccacctatctttatgtaccccaaattctcatccttctgccctcctacatccaaggtcactgctatttttaatcttgtgttcattgttccttttaaaaaatgggtttcattgtatttctatgtattcctaaaaactaatgttagctgttttcagctttattaaaagaccatcatttttcatgaaatctctgggacttacttacccccatcaatattgtattactaaaatttatccatgttactgtgtgcggctgtagttaattaattttgctttctatagaatatcccattctgtgagtgtactaagtttatcacacattgtactgcagatgggcatttggattgttctcaggttttgctaattttaaacaatgtctccatgtacatatttgtacatatctcctggtgcacatgtgcaagtttcttttgagtgtaacctgagagtggaagtgccaggttatagggtatgtgagtgtttaacacaacaaaattttccaatctgtttcccaaaacagctgtgtccatttatgtgcccactagcaatgcaaaaaagatccagtggcttctttacttttgctatttgaacagggacaaaatgacatctcagtgtggttttgccgtggcttttcctgattactaatgaggttggccatttcttcatatgtttattggccataagtgtttcatttaactcagttttaatgatggggctgtagaggtttcatggcagagcttgggtttcatggcagagcaatgggctttccttgatgagccaggaaggagccatcagaaatgcaggcatctattttcctcagggttggagcctatcctgcctctgctgggtttcctggtcagtatcatggactctgaggtcagacttgccacagaaaattcattcctgggtaaggcatgagaatctccctctcactgttgacctttccagtctaggtgctcccttcctctggtggctgcaggagacagggagggatggccagtgctgttcaggtctcagaaggctgatgaggcaagagaagctgagggagcagctacagacatcatggcaggtcctcctctaagtccagtcctcctaaataagacaggagggactgagggtcctatgtcactgtggaggactgcctttgcggggtctatgacctgtagaggaagcaggggctgaggcacagcccatgattttctcacacctctccttagagtctacctcaagggtgctgtcttcataccagctctctctgtttcttcctccttaagtgccccctctcctgccctgaccagggaacctgcctctttgtacatcctcaggctgaatgagagacagaggaaggtcaaggggatagcggtgcaactctcggggaccctatggatcaacacccattcaaggtacaggagaaatgggagggctccacagccttcttctcacagtgcccctgtcagctggagtcccacccttgggagcctaatcccatctagggtccccccttacctggaagaaaggctcctcctaaggacacagatggcagaaagttccagcaaaggagcaggaaggagttgcacacaggggtacctggtgacagaacaatgtcaggatgaggctagatcctgtttccactagacccccaagcaggctcagccccacccctgactcaggtcccaagactataccctggtcttggggagagtcacctcacctatataagcctcagtttccttcatctgtaaagtggggattataacacgcatttcagaatgtttttgtatcaaatgggagcacccaaagtacctaataggtgctcagtaattgttaaatctgaatggcttttggaggatgggtgggaactggggaaagatatttcagattagcttagttattcaaaggagtatctggtaaaatgagtgggtggtcaggattcagctgatgaaagcagcacttactgcaatttggtactggagacgtaatgctctaaagaggttgccataattgctgttccattttatagataattcagaaagaggtgaagtgacttttccaaggtcacacatggtgagaacagcaaagcctgcatttgaacctggcctgtctgtctctaggtctgagcccttacctgcttggttattccggtcctactctcccagactcgcttgctcttctttgggcctgctcagctgcctactggcctggaccagagcctggttattctgccacacttggcaggtgaactgttttttatcctttcactctgaagtgttgaccaggatatgattgtcttgggtgaatgtgccatctgggttcttggtggggccaagtgcctcacaggtcttgaagtatccatttctctttagccaggcaatttgtgtgactttggggtgaaacctttgtatatggcaggtgagaatggcagtctggagtcctgggacatggtgtgctgagatattcactgtgggcacaactgaaacaatagcactgccttcgttagtttcttcctttatgcaaagcgtgctcaaggggtgtctacaccttcctaggcagtgtgcagggttcttggaatacagcattgaccaagacaggcatgttccttgccttatggagctcccgctctggtgaggaggacgggaaggaaacaaagcagtcacatgactcctacaggagttccaagagcctacaatagggacaattgacctggtctgcaggagggcaggttaggaaagggtctccagaggaagtaacctttgtgtggaaatctttgaatttgaaagattcaaatatgaaattcaaatatgaaagacgaattaagagttaactctatgtggcagattgcattttccaaaaattatggcagccacatactcttccagaactttgctactccgcattagaggaggagtctatttctgctcccctggactttgtaactgctttgatgaatagaatgtagcagggacaacactgtgtgacttctgtggctgggtaatgaaagttggtatggcttctacctagctctttcttgggacacacccttgggacacagccaccaagctattactagcctatgtggaaatgttggggaagcaggagcctaggagagccagactaatgctactttaagttcaactctgtcttggaactaacaaggcacattccttgctggttacgaccgacagttataagatatttacaacggaagaaaagcctaaagattcctacaaagacacatttctataacagtggaaagtcaggatgtcccaatacccataaaaatatatgttttcaagatcattatattctttgatgtactcaaactctagaatgtcaaggatagttttctttaaatcaatagaataataaattttgtcacgctgtctgctcacatgagtgtagacacagcttagcttagcttttacatggacaagacacctttataagaaaaacttaaagaagaggctttcctctgctttctttctgaggacaccccaccctgtaagtgagtaactttcaataaattatctcttctcactgtactctgtgacttgcctttaacttcttcctgtatcagatccaacaaccccctcttggggcctgaatagggaccctttttctggcaacagaaagataataaggaaaagcccatgccaagaagaacaaaggccccaagccaacagccaggaccaatggtcaggcatgttagtgaaggagcctttaggtgattccagcctctgaattgtccagctgaggctcaaccatcatagaacacagcaagctgtccttgcccagccctgctggaattcctaacccacagcatctaacagcatagtcatttaagggaatatggagtaaatttggaatactggaataaatttggggataatttgttatatatccctaataattgtgaaacattaggcaaaagggtttgtggggcaggagaaggggggtgctgggagaggttgggggtgggaatggcatctcagcagacagatggacctgggcagaggccctgagtttccatggactttagaaagaagatcaaagtgaatgagagagaggatgggtgagtgaggctgaattcatagccaatctggaggctggctacacttaaaggtggcctgggggcacttaaagacattctaaggcatacgaacattattttaatacaattaatttccagatcctgaaccctcataagactgtttacttagattgatctgcctgagaatgagcatcagggccattttcttttcttacctccggtttctcaattttccttctcccatatcacaaaagaaaggccttcctcccacacttcctgaagtggggcattgtccttggtgtaaagactttgggatgcaaaataaaaggacatttcaaatactgctggccaggaagcctgctttaaccaaagcaccatccactcccccatctaccttgccaaactgcatttccaataccaagttaatggctattttaataattacttatcaaacatttttatatatttagattgtttggatctattgtgcaattcaatccaaaagaatgttttttgacactgagagccttatggtcataaaaattttattttaaatttcaacttacagatgtagttttgcttgagttctgtgttctcatagttctctgtgatatgatctgtatgattttatagtgaagaaaagattttccacaataaaatatgttacattaaggtaaaattcttcatgggagttagaatggaaatacaactttaagaagtaaaaggaatgatataagatgcctgattattaaagaagagcttctttatgtatgtttaaatggatcatggtggaaattaaattatgatgatgttatttttttcactgaatatgttttggagtgatgcaacatttgtaatactccaggagttatgttctgtgcaaccatttaagcttaaaatgaaaaattttagagtcaactttaaaatttatgatacactacatagttcttcacaattattttagggaaatatacacaaaaatgcttgaatatcacatttgaacatcccagtaataattttttttttccctaagagaagtgatgagctactgtaggattttaagcaaaggagagacatgatctggtttcctttataaaatccccttggctgctgggagttttggggaaggactgtggagggcaatggtggatattagcgatcaattaggaggctcttgcaattgctcatggatgttggcttgagcttaactatgaacttaagtagtggcagtggaaaagaatgtatgagttcaggaaatatttgggagtgaaatctgatagaacttggtgatgggttgtgtgagaagaggtttcaggcttggatgacttggtcgatggggagtgtcttcttcacttatatgggtaggatggaaggagcagcagttctgagagggttgggggagcagcgcaacaccaatctctgggctgaccatgactgaaccaccactcctggggaaggtgggggtgggtattgcctttctctggtatctctgaataggtggttcttacaggaggcagatcagaggtagttatctgaagaggtgtaacactgggttcaaattccagcatgcttactgaagaaccctgtgaccttgggcaagtcacttcacttttctgggcctcagtttcctcatctgaatgaagcaaggacacaaagctgcctctagtttctttgagatgattgatgtggaggctagaattcactttccaggctggagctctcttgtggtatcttttggttaagcaagacacacttctattttgggctggaggcatttgagtaatgaggagctaaattcttgacaatgataccataaattatctcccttatggggttgctgtggagactatggtgctattaatgggtctccttggttttctctggctggagctggagagaaggaaagagggagttctggaaccctggaaggaacttcacccatctgcaggaggtaactgagactactctatgctgaggttggttgggggcaaaggacagtacaggcccctggggaaagcccctatgaaggcaaaggcagatggacttgaagtaagagccagaaagggcatgtgtgtgtagcctgctttgctggttctcctgatgccagggtgagtttaagaagcatgtttcaaaggtggtgactggtggcaaggcagtggtggcatggtggtttgaacaatggtgttaggagttcccatggagagttcaagtgggagaaacttctttgctgtgaagccctaggtgatcaggtccctgcccctctcttgccagcctcttccttttccatgcactcgtcctctcactaagcctcagccacactggcttcgtctctgcttctcagacatgtcttgctccccgctgcatcacagggccttttcacgctctgtttcctgtgcctggaacactctgcactttgcttggctgactccttttcattcttcatgccttggctcaaacatcagttcttcaaaaagacatttcctgagtaaactggatttctctccttttcatatatttcagcaatctgttctttctcttcatagcaaatgtgatgaatataaccatatagttgtttgtgtcttggttgatcgggttcacatgactgtaaactcagcaaggcagaaccaggtctgcttggtttaccatggaatccccagcaccgagaataatgccaccacatagcagatgctcaacaaaacctgttgaatgggtgaatgaagttccacctcccaaagacgctagagggaagggagctctgaaagagaagaactcgatcatagcattatgcagaaggaggatggtcatataaaacagggaaccttatcaccacctcactgagggttttgtgaggaatgaatgggaggatgcaggtgacatgcttcaagcagggagcctacagtggtcacaaaaggttggccctgtttgtgtggggggcttaccttggagaaattgggagatgttcacgtgccctctgaggggactctgcaattcactgtgagccacttggcaggtgacctgggagtggagtgaggagaagccaagggtcactgtagcagtgctgatgacggtgtaggaggaagcatctgcatgcgggaagacctgggtctgaaaggctggaagctctatgccatttttgagccatttcacatatatgttttcggcaaagaagccagttgaggtgcaggtgagattcactagttggcctgggctagccctgttggaagggccagaaatctttggaagagagagcttagctttgatcagggcaagggtgaagagaagaaggagagagaagagagaaaaatgaagagggagagttactctctagcccaatactcaccctcatggttcactctgcttgacttcctgccccaatcgcccatctccagttttctcctcttcataaactttatcattactcttcttgttataacggcctatcaactgacctcactgactttacctctcagctcttccaacctacacttggaaatcagaccatggtgatcttgctaaaatggagatctgaccatgttattcccttgctcaccttcctcctgtcccctctcatccctatcttcttcccaaagtacattgtttaaaaagtcacataaggtatatcccgaaaaacagcagacccctggtttcctctccttgcaaatattatagaccaacacgttttaactattttagtggattctttgggcatatttctctgtgtttctatgttgatactaacatacttatactgttattttcatattttctcatctttttcagttttatatattatggatctacctactgctatggaagatgatgctctagctctcttacagctccttctacctgccatccatatttctccgcctcacatcctcctattaaagacacatcataattttttgttttatcagtattcagcatttatattattatgaccaaatgagcattattcataattgggccatgtaatatatcataatcatatttcctgtcttgtacagctttttgttttccgtggaggtttttaatatatattttttaatttttaatttttgtgggtatgtagtaggtgtatatatttacagggtacatgagatgttttgacataggcatgcaatgtgtaacaatcacatcatggaaaatggggtatccaacccctcgaacatttatccttcatgttacaaataatccaattacactcttttagctattttaaaatgtacaattaaattattgttgactgtcatcatgctgttcttttaatggtgtcattattttcatttgcttcattttctatgaacttatgacaaactcatccccaagctttctgccagatttccttcatgtttgaaactactaagtactgcactggacttcactttagggtacatgtgtattcaggagtgcacaaagatttttcaggggattgtataggcttgaattaaaaaatctttttattatgataaatttgtaaacatacataaaaacagagagaaagtattcacaatggcattttaacagctacaaacaaatggctgatcctgtttcgtctacacttctcccatcaactgctgggttagtattttttattgtatacatttaaagtgtacgacatgatgtgtagctatacatacacttagtgaaatgattactacagtcaagaaaattagtatatccagtatctcacatagttaccattttcgtgtgtgtggtaaaagtatctaaaatcctccctcttagcaaatttccagtatacagtacaatactattaactgtagtcctcacactgtacattagatctctgggcttattcatcctacataacaaattttgtactcgtggacttccatctgtctccccattttttcaacttcccatcccaggtaaccattgtcctactctgtttctatatattcgagttgttttgttttttatattttacatgtaagtgagagaaattaaaaataaaactaccatataacccagcaaggtttttttcaggtatatacccaaagaaaatgaattcaccaccttgtaaatgtatctgcatgcccatgtttattgcagcattactcacagtagctaagatatagaaacaacgtaaatgtttgtcaatgtatgaatggataaagaaattgtggcatatgtatacaatggaatattattcagccttaaaaataaggagatcttgccatttgtgacaacatggatgaacctagtaagcattatgctaagtgaaataagccatacactggatggttttaaggtaaataccagacatgatattatttcattcttaactacttcagcatgtagaagagttaagaattctttttttaaacaataaaatgtcattattatacttaaaatttaatagtaattccttaatatcatctaacatttgtcaacagtcaaatttttctgcttgtctcataaatataactttacagttggtttgtttgaatgaggatgcaaattaaagccatatgttacattttgttgatgccttttaaacctctattaatctaaaggagttccacttcctctttgttctcttgccatttatttgctgaaaaaaccaggttgttgactctgataaattgcccacatccggtactatttcccagtttcccaactgtattcagctgcagtcgcgcgcagtggtagtgggcttgataacatgccctttattgactggcttcaccactccttactgttgttaattgcactgaaatccttgtcttacagttggcttctcactgaacctatctctgtgttttaaagtccctcgaaataattagtctttgtctagttaagccatcaatatatagttagattaattagttttactttagatttagtaatttagatttttaggattttttttcattttggaatttattaattatttaaaaattcatgtgcttagaaagtcaaaacgtaagtcacagcacattcagagaagtctggcttcccccttgtctcttccattctgttccctttctcctttacatgtaaatttttaaattatgattttagtttattcctctttttctaaaaaaacaagacacaaggccgggagcggtggctcactcctgtaatcccagcactttgggaggccgaggcgggtggatcacgaggtcaggagatcgagaccatcctggctaacacggtgaaaccccgtctctactgaaaatacaaaaaaaaattagccagacgtggtggcgggcgcctgtagtcccagctactcgggaggctgaggcaggagaatggcgtgaacccaggaggcggagcttgcagtgagccgagatcgagccactgcactccagcctgggcgacagagcaagactccatctcaaaaaaaggaaaacacacacacacacacacacacacacacacacacacacacacacacacacacaaaaccacaagagacaatatacacatgcttgtatttctcactcttgtaaacataaaaggtagtgtgctccacacactcttctatatattttcctgtttaatgatatgctgtgggtcactctgaagtggtgtgctgagttcctccttacgcccttttaaagtcacataatacccagtgtgcggctgtaccataatttagtaggcagctcagcttttgctcttaccaatagtgttgtgatgaagagcctaaggataagtcatcctgcacttgtgttagtagatctttgggatacatttctggaagttgaattgttgggtcacgaggtaattttgctagatattgccaagttcacctctttatgagttatatggttttgcattcctaacagcaaaatatggagtaattgtttcgccttagcttccccaacagaacgtgctgttgaacttttggatttttggtcaagcagataggtgagaaaccgtgtctcagtgtagtttttaatttgcatttcttcctatacaagggtggttgagcgtatttttatatgtttgaaacatttgtatttcattttctataacttgtcttttcccatttattgcccataattctaaaaggttgactgtcttctaaaattttagaagctttctctatattagggattattttttgtctacgatgtaaatcgcaaaatagtacacacacctatacacaagtttctttttgtacaatgcgatcaaaattataatcttttaaatctttctgcattttgagttacagttgggaaggttttctccatttctaggttataaaagaatatatatatatatatgttttcttctagtacttaaatagtttcgtttcttacatttaaatctctgatccacttggaatttattttggtgtatggtgggaggaactagatagatacacttctggatttttctatgctgttccattggtctattaactcttcaaatgatccaacaccacagttgaaaagtctcttctttttccactgacttgccttcatactttttttttaagcaatcaattgaccatatgtatgagtctatttctagaatctctattctgttccattgatccacttgtcttttttttcttttctttttttattttttaatttattttattttattattattatactttaagttttagggtacatgtgcacaatgtgcaggtttgttacatatgtatacatgtgccatgttggtgtgctgcacccattaactcatcatttagcattaggtatatctcctaatgctatccctcccccccacttgtctatcttgatgccaataccacactgtatgattactatagctctataataattttctgttcatgagggatattgatctatagttttgcttttctatgattctttatctgtaatgctggcctcacagaatgggaagcctcacttcctctttaattttctgaaataatttgagtaaaattgttagtacttcttcctcaattgtttgatagaattcctcagtgaagtcatctgggtctgaattattctttgtcagaggctttttaaactacaaatttaatttctttaatagatatagcgataattagcctatttatttcttcttgagtgagctttagcagtctatgtctttcaaagaatttgtccatttcatcaaagttgttaagtttattggtataaagtttttcataaagttccattataatctttttaatatctgtggagtctgtagtagtgtcacctctctcattattgatattggtaatttgtatcttctttcttttttcctgattaactgtgtggatatggatttattaattttatgaattttctcaaggaaccagcttttgctcttattgattttttctatattttttcattttatgtttctgatttctgctgtgttccttattatttcctttcttcattttttcctactttttgaagtctctgaaaaaaacctttcttctgtcctaatatagggatttagtgctatgaatttcctgctaagtactcttttggctgcatgccacaaatttggtatgctatgctttcattttcattcagttaaaaatattttctaagccaggagtggtggctcatgcctgtaaccccagcattttgggaggctgaagcaggcagatcacttgagctcaggagtttgagatcaacctgggcaacacagcaaaactcagtctctacaaaaaaatacaaaaattagctgggcagggtggagtgcacctgtagtcccagctactcaggaggcttaggtgggaggatcacccaagcccgagaggttgagactacagtgagccgtgattgtgccactgcactccagcctgtgggacagagtgagaccctgtctcaaataaataaataaatacatacatacatacatatacaaaatactttctaatttttcttccgatttctttttcaataatgtattattcagaagtatatttagttttaaaatgtttggagattttctagagatgtttgctttttaaatttaatttctatgactactgagggttaaattaaataaaattaaaaataaataaataaatttaattccattgtggtcagaaaacacacttctcatgacttgatttatttcaaacttactgagacttatttatggctgagaatacaatctatgttggtaaatgtttcttttgtagttaaaaagaatgtgtattctcttgttttgggatggagcattctataagtatcagttagctcaagttggcttatagtgctgttcaagtcttctacatctttactgattttctgcctcctttttttaccaattattgaaagagaggttttgagatctgactataattgtagatttttctatatattcttgcaattccatgagttttgttttatgtattttgaaactctattattatatgcatcaacatttagaattggtatattttattaattgataagcttattataaatgatattctatgttctcataatttctttgttctaaatacactttgatattaatgtaggcattccatatttaaaaaattattgttgatgttgcatatatttttctgtccttttatttttaatctatttgtgcctttatttttgaagagaatcaattctctgcaggcagcaaatagtggatcctactttaaaaaatataatgcaaaaatcactttattttaattggtgtgtttaaaccatttacatttaatatgattatttatatgactaggtctaaatctatgatcttgctacttactagcctcatctcttttccagtgtacctcattttctgtcttcttttggattgatttttatgattctgatttatgtcttttgtcagtttattagctattactctttgttgtgttattttactggttgttttgggatttctggcatacattattaactcatcattatttaccatgagtgataaggtatcacttcacacatagcataaaattcttacagtaatatatttctgtgtctctcttcctggtctttgtgctatttttctcacacattttacttccatgtatgttataatttgtcaaatatattattattgtatttgctttgaacagctatgttttaagtacatttaaatatacttttaaaatattttcccacattgttactatttctcttgcttttaatttctttgtatatatccaggtttccatctggtatcatttcactactgttggaaggacttctttttaacatttcttgtagtgcagatctgttgatgatgaattctttcagcttttgtatgattgataaaatctttattcttcacttcaaaaattgtggtaaagtacacataagatctgccatcttaaccattttttagtgtacagttcagtggcattgagtacacatttagagtacagtttcagtggcatgagtcacattgttgtgcaaccatcaccactatacatctctagaatgctttccatctagcaaaactgggaaaatatatggaatgcatcacaaatttgcattccatccgtgtacacaggccatactaatctctgtatcatttcactcttagtatctgtgctgccaaagtgagtacttaactccagcctggatggcagagcaagactggctcaaaaaatagataaataaattaaatgcttaattttatgtatttattttaaaagatatttttgctaggtaaaaattctagaatgactaattaattattgttttctttttaaaaatgctttaaatagccaggcatcgtggggcatgcctgtaatcccagcattttgggaggccgaggagggtggatcacctgaggtcaggagttcgagaccagcttggtcaatatggtgaaaccttgtctctactaaaagtacgaaaattagccaggcatgatggcaggtgcctgtaatcccagctactcgggagggtgaggcaggagaattgcttgaatctgggaggcggaggttgcagtgagtcgagatcgcgccgctgcactccagtctgggtgatgagggtgaaactctgtctcaaaaaaaaaagaaaaaaagctttaaagatgtatccccactgtcttaagcttgcattatttttgatgaaaagtctcctgtattttttgttcttttgtatttaatatttctttttggggggctgcttttaagatattttctttattggtttgtgcaacttggtttgtgcttggggttcatcgagtttttggatctgtgggtctacagttttcatcatatttggaacatatgtgaccattatttcttcaaatattctttctgtcccctcttccactggtgtctccaatacatatctattaggccacttgaaatttccccatagctgctgattgatgctctgtttatcttttttttttgagatggagtctcgctctgtcgcccaggctggagtgcagtggtgccatctcggctcactgcaagctccacctcctgggttcacgccattctcctgcctcagcctcccaagtagctgggactacaggcgcccgccaccacgcccgactaatgttttgttttttttttagcagagatgggatttcaccgtgttagccaggatggtctcgatctcctgacctcgtgatccacccgccttggcctcccaatgtgctgggattacaggcgtgagccactgcatctggctgctctgtttatcttttatacagtttttaatttttttggtcttatatttggatgtggctttatatattccatttttatctctctgtgtcattttgaatagtttctgttgttgtgtctttaagttcattaatctattttcttcaacatcttaactgctattaatcctactcagtctatttttcatcttagatattgcagctttcatctctaaaagttcaatatggatcttttaaatattttccgtgcatctacttcacatattcagtttttcttctagcttcctgaacatacagagtatacttataataactttaatttctttgtgtactaattttatcacctgtcttttctggttagtttcaaatgattaatttttcttattatgaatcacattttcctgccattttcatgcctggtaattttttattggataacagatattgtgacttttacttcaatgggtagtgggtattttgcctttctataaatatgcttgagcttgttttgggacatggttaaattacctggaagcggtttgaacttttcatgttttggacttaagctttgcaaggcatgcctccagcatcatttggtctagggctaattctttttcctttactgaggcagaactcttctgtgtattctaccagatgtcccatgaattataagtttttttcactcaggttgtaaagatcaggcactattcttagccttgcgtaagctccagaaatttttctcctctggcctcatgtacttttctcatgtacataatacacttttcaatacttcactgaatattcaatggggaccttttacagatatttggagttctctttctgtgaaacgacctgctctttggtgccctaccctgaaaactctagtcacttggcctctgtggacatccaggtccttcttaacaactcagggagaacttcgggctccacctgagttatctcgttctgcatggtggtcttaaagccttctcagagagtactcttagggcagccttagggctcgcttcatttatgtcccatttcacagggatcactgtcctttgttgcctggtatccaatgtcttgtctaccatgttttaaataatttgcccagatttttagcaagagagtaaatccagtccccatcactattttggtagaagttgccccaattatttaatttaatttaattttgctattgtactatgtgtttgtcttttttcactgtatgttctaactggtttttctttgtatatgtgaaggttgttgatttctgtttgttgattttataacttactatgttacttaaattatcttgttttttatagcagtttaatgttgattctattaagttttccagataccatatcatctacaaagagagatagttttcccacttcctttgcaattaatatgctttttattgttctctccttctaaaagcattgacaaatacttcaacgtaatgttaaatactattagaaatggtgggcatgagtttgaagactgcttaagtattctactgattctatcttttggagatgtccctagtaatgctgcaagtcctcctgttctggaatggcccagtggccatttctatgcctcctgcacaactgttatcttagggtttccaatcccctattcctagttctcattcttacctttttttttttgtatgactcctattttagttaagcataagagggtgtaaaaagcaattcttgataatcttgcaaactccatagattgtctgggtaaatgattttagctttgaaataattttccctaagaattgtgaaggcactattccttgtattcctgggtctaatattgtccttaggcatctcatgctggtgtcactcacagtgctttgtgcataactttttagtttcaattctttaaaattgtatgacattctctttgtccccaaagactgcctaccattctccttgtttctccatggctgtaagctaaaatgtgaaagtcccctaaattatcttgatgtatgtttctatggttctgttacagtaaattatcacactcatttttttaaaaaagaatcataataattaattcaccaatacaagtacatctgaactaactgttgggcttcccaggctttcctttaatgggtgctgtttagagtcttgcaaggtttgtcttcagccatgattgaatcagccaggaccaaactcgagaatacacagaacttatagaaacaaaggacaaaattcaagaaatgtaggaattacatattctatatcaataatctacatgtgattcttataactttctgcctcaataaatttatcattcatatcttatgggaatctatggttccatgcttttaagattatgtttttaagtttaattggttgtaatatcctgagtattaatgatgtatagtaatataataattattatacagcaggcactcttctaagtgttttccatttataagcccattcacatttataattcttataacaaatctgtgaagtggatactattgttatccctaccttaaacacaagggaattgaggcacagagaatttaacattttgaattaagaatcttaattaagaattaaggtcacataggctgggcatggtggctcatgcctgtaatcccagccctttgggaggccgaggtgggaggatcacttgaggtcaggagttcgagaccaggctggccaacgtggcgtaatcaggtctctactaaaaaaaatccaaaaaaattagccgggcatgatggtacatgcctataatcccagctactcaagaggctgtggcacgagaatcacgtgaacctgggaggcagaggttgcagtgagctgggatcacgccactgcactccagcctgggcaacacagagagaccttgtaaaaaaaaaaaatagaattaatgtcacatagcatgtaaatggcagagcaagaagttgatcccaggccatctggcgctgtagtctacttttacccactgtgctttgtgggcctttggaagctgtaagattctaaagagttaggagtctactgatagatggcgctggggttacatttcaccctgttccttcactgtgacctctcactatccccatcttctattcataatcttggcacaagggctaacaaagggggagccttaggctaggctcccagggattgtaatttgttttagaacaatgcgctggatttctagggatctgtactccaccatgcacaaacatctgggtgccttgtccagacttaatcttcatgtaggcttcctttctggaatttcacacagtagtaggtgccggctctgctggtgtgatgcttctgatacagatggaatagtttgtgctctttctatttgtgatgtctgaaacagttcttatccaggggaagttgccttctttttgactgtagattaattcccggcctggtccagctcctctgaaccactggatgggccctacggggatcagggaggtcacagtgcagtgtagagtggccgcttctccagctgcgactgacacggacttctcaggctgaattacccgcagctcctcctcacccgccactcctggaagaacacacgtcagctccaagctccagctggggatgaggctgcggtccaggtgcctgggttcagattgcatttgaagccccattcattctttctttccatatcatgtattagcttttaggatgggcacattccttaactgggtatcaagagagacatagagacaagatagacagacagcccttgctaaggacacagtcaggaagtcaaaagagaagaaatacttctagaaaagatgttcaacaacaccagtaatccagtgaagtgcatagttaaaccacacacaaattgctaacgtccatgacagactagctggaaaagtttttaaaaaaaatgtacgcaggtttcagcatatgaaagttagagcacattttcaggctgcaataaatagtagaggcaggttggtaccaaggcaagcagagaggtcgatgaaacagaagagagaacctggaattggacccaggtaaatagacagatttattgtacgatcaagctggcattttatgtcagtggaagaaagctctcttgaagaaggcaaatgaaactcctaaaaagtagctgtctccagggagtcagaagagtatgggggcttttgttatttacttgtacgttccttccctgtttggattattttgacagcaagcctgaaatacaataaaaataaaataaaataaaacatttctccctcctgcaagctaagagcagacacaatttttagaatattagcttagcaaacatgaaaaagattgccaattttctgtgttgctaaggttgtggtgaggcaggcgctcccacatactgctggtgggaataacaatggacacgatctctctagatggcaatacagcatcacagtcatgatcttatgatctatgtccacgtgacaaacccatatttaaacaagtaaagtggagatactttaaccaaatctgttttggtcccaaatgttcaaaataccccctgtccattgctgctgcttctgtgctgggtgtggtgagataatatattactgatattgagacactcacgtttcattgggaaatggcttttgaaaccaaaaaacacttttgaaatgcaatttcccaataaaactcataccctttgatttagtaattcctctttgacggccttattcaaaagaaacaatcagacaagggtgaatatgatttgtaaaggaatggtaatcatagtatttacaatatagaaaagtttgatgcatggcccatgtccaagaataggagtgagttagataaatgatggtacaaccacaaaatggaaaactatgtagagattgaaatgatagtgttgatgtatatattggggatgtattgatgatgttgcagacacatatatatttacatagaaaagggtccccaatttatcattgagtaaaagaacaaataaaccaccatattttgtgtaatcttatttttgttaaaagttcgatgtatctagaagcagcacagtgaagaggtcaaagtaagagctagtggagtcccattgacccaggtttcaatgcctcctctattgcttgattgctatagtttaaatatttgtcccctccaaaattcatgttgaaattcaatcctcaatgtgcagtattgagaggtagggtctttaagaggtgattgggtcataaggactctgcgttatttcacaaattagtggattaatgggttatcatgggaggggaactgttggttttataagaagagagagagagacccaagtatagtatgctagcatgctcagtcccctcaccatgtgataccctgtgctgcctcaggactctttagagagtccccaccagcaagaaagctctcaccaaatatggccccttgaccttgaacatctcagcctttacaactataagaaataggttctttttctttataaataatccagtttcatgtattctattctaagcaacagaaaaaggactgacattggtgttttactttgcgaaaataacctccctgaggctctgttttcttatctatgtaatgtatacaatgtggaaagtaaaacttcctcttgcaattttgttgtgatactgaaacctgaaaatctttgagaaacactcaggactgtgctcatagaaggacttctgtgaaatgggctttccattcttaactgcaagtccagtaggccaggctccagccctgacaacctggtgattctaggaagcgcacaccattgcttggctttcagttccttcttctaccaagcctgatggacctttctcagttcccatgacttctgtgagttctaagtgaagacatagacttgccaaagacacagagtgagagttgcaatggccggatgcagcaggactattttcgtgggctcatatttgcacttattaagccctaaaaggctgtaacaaccagagctcacataggtggttctgtgtgctacacattactccaaaaacttaactatattaattaactagtttgattctcaccacaactgtattggaaaggcattattatttatcccgatttcacagacaagaaaacagaggcacagagaagttgagtaacttatccatagtcaaacagcctacaaatgatgaaacttgcatttgaaccccggcctgtcgtttttttttttttttttaatgcctgtgcttttaaccactttattagttggactctaaattgagatgttaacaccactgggagaagaatggttgcctctcctgactgtgcagatcatctttggagagaagagagtagacaggcaggagaaacacccgcatcaagaacgtaatcctaggtttctgagattctgggagacttactagtctaaaaaggaccatttagcaattttttctaatagttctacattgcatgtgtagtacttgttgttatctatctacctatctatctatctaatctatctattaatcacctatgcatccatgtgtactcatcttaatgacagcatccctgtctccctcctggggaccaaggggtcaaatgctgctcctctacttcttctctcaggatggcatcaggtcctgcaggtcaggcctagggggtcgtggaaccttcacaggacatcaggggtgtgggaagtgagagggactgggcacccctgtcatggggaaacgcctggatgggagagaaagcaacccctccaagcaagaagaattctggaaggatttgttttggagacactagttataaaacaaactatttagggaagtgtcttaaagaggaaggggtggcaaagaaagaggccctaggacaacagagattcatccgccccactgcaggtggcgaaatggtaccgccgccaaactcaggagagcatccctgcatcatggtacctgagggtgggggcactcacctgtgagtcccagcagccggaggcagcagcagggttggacgaaatagtttgtgctgtttctctcaggcagggccgagaggcaggtatgggcatcatggtgggccctggagcctgctctgcctgcaggtctgttcttgggaggtcttggattctgctctgctgagagaggcaaaactatgtgttccatgatataagaggaagttactatgatgggaggaaagggctgtaggattatgaccgttccagtttctagattgtgaaataggaatcagacacaagctaataagttactgatataagggtcccaaggtgcttggaggggccctggcagacacccttagtgcctaggctgtgtcctttgggcccctcactttgtgtcaggtgtgctggtgacccttcctcatccaggagcccaggaacagggtctgccatagagaacggtgtgtccagcctcctgtgatagtccaagacctgggctcagatgagctgtgcagctagtcaggaggagggctcccgggaatggggcttcacaggtgtggatccctgtttttccccactccagaggtgtcagttgtaaaaatgatcctgaagccatatctgatgggaggctttggctcttcaaagtacgcttacaggggaagtgactttgagtgagcaaggagttcgatcttgggaggaggaggatagtttctgttttagagaaaaggggaagaagcctgtgtgtgtcaagcggggggtgcagggccttagtgtgctcatactgcaggaacagtgacatgcagaaacgcagctgggaggaggaggggtatctcttttttctgtccctagtctggggccacctcttgggagaagggagtggaggagatgtagaaacactcacaccaagaatacatctcctctcctccttctgagcagcagccacctgcacatgaaatcacattcagagcctctagccatgagctcatcacttctgtggacccagtgccagacactgcctcctgtgactcagtttccccactgctccccacccctgcctccttaccagtggctgaccggatgttggtgatgagaatggtgatgagaaggggtggaatgaaaggggccaatcagcgatgagatttgattgctctgtagcatgatgagtgtccctctcccctcgacaccttattctagcttgttaaacattttttctgagagggatttcttgacaaggaactggccagagtgttccgtttagcactctttgttctaactctaatccctgtcttcactgatgacagattctattttctagagctgactgcaacaaggtccctcttcactcatgctcttcgacactcttcccatggagatgtaggcatatgttccctccccctgagtttgggcaggtctgtgactgcaacagaagggatgtgatgtgacttctgaggctagaccataataattccctgcatttctacctggctttcttgggatgctaatttttggaaccttgccaccatgctatgaggaagcccaaactagcatgcatgaagagatcacattgcagggacacatgtaagagttctaactgacatcccagctaagatgcagccaatatccattatcaatcatcagacatgtaaaagaagaagcttccagatgacccagcagttgagtcatccccaggtgagtttcccaactgagaccccaggcaacatatagcagagataagtcattcttgtaccctgtctgaattccttacccacagtgtcattgatcataataagatggttgtttttttgaccttgtgttttggggtgttttgctatgcagcagtagtaactagacagcacccttggcaacatcttccccacccccactgaccacactaaaattaaacctttgtcattgttttagtaaattgttgtaatggatgctttcattactgggtttcaatcatttttatttttctgatatagggatttaaggctataaattccaagtacagcagtaactacatgcctcaagtttaatgtgcagtattttaattattatttagtccaaaatattttctagtatctgtggtaatttcttttttgataaatcagttatttagattatttcccaaattcctaatatatgaggattttctaatgatctttttgtaaatatttatagtttaattccacaatgatcagaaaacatacttatataattttgatatttcaagatttgttgagacttgcttcttgaccaagcttatgattaattttagttaatatctcacatgggcttgaaaaggagctgtgtttttcagttgttgggtgcagtgctcaattacatcaaatttgttaatcaccttgatcaaatcttttgtatccttactgacattttgtctgcatgtcctcctagttactgagagaactgctgtggtagtcagcctttgagattatctccagctcctggcattcaccccactatgtaatcccttcctctggatctagtgattcacttctaatgaaaaagtaaaagtaacaggatgtcacttctgaaattagcttataaagaaattgtgacttgtatcttcttcttcccctctctcctgcttcttgaggagaagcagctgccatgttgtgagctgtcctatggagaagcccatgtagcagatatctgatgtcttcagccagttgcccgcaaggatctgaggcctgccaatagccatgggagtgagcttgaagtggattcttctccagttgagcctttggattattgcattattggcagacaccttgattgcagccttaaaagagaccttaaaccaagatcactcaacctaaactatgtctagaatcctgactcacagacactgggagacagtaagtgtttgttgtttgaaatcactaagttttgggtaatttgttatgcagcatagatgactaatacagatttgttaagaatctggtagcttaattgtgagaaggcaatgtgaaaatggaacacagagagatttaaagacactggccttgaagatttattctatgctgctgacaggccagggatgctggcagcaaaccagaagccaaaagagaaagggaatatgttctctcctagaacctccagaaggagcagttctgctgatgccttgatttcagtccagagatgcagatttcagacttctggcttctagaactgtaagagactaaatttggtttttaaacaactttattgagatgtacttcatacaccatacaatttacacatttaaaatgtacaattcaatatttgcagatatttgtctgtagatatgtgcaatcataaccacagtcattttgaacatttttatcatctcaaaaaagactccatgcctttcatgtaataacctccattttccctatctttccaccatcccccaaatcataagaaatgttctgtctttaatctactttctgtctctatagatttgcctattctgagtatgtcatatacatggaattatttaaaaaattgattttttaaattatactttaagttctgggatacatgtgcagaacctgcaggtttgttacacagttatacatgtgccatggtcatttgctgcacccatcaacccaacatctacattaggtatttctcctaatgctgtctctcctcttgtcccccaccacccaacaggccttggtgtgtgatgttctcctccctgtgcccatatgtcctcgttgttcaactcccacttataagtgagaatatgtggtgtttatttttttgttcttgtgttagtttgctgagaatgatggtttcagcttcatccatgtccctggaaaggacataaactcattcttttttatggctgcatagtattccatggtgtatatgtgccacattttctttatctatcctatcattgatgggcatttggggtggtttcaagtctttgctattgtgaatactgctgcaataaacatacatgtgcatgtgtctttatagtagaatgattataatcctttcggtatatacccagtaatgggattgctgggtcaaatggtatttctagttctagatccttgaggaatcactgcactgtcttccacaatggttgaagtaatttacactcccaccaacagtgtaaaagcattcctatttctccacatcctctccagtatctgttgtttcctgactttttaatgatcaccattctaactggcctgagatggtatctcactgtggctttgatttgcatttctcaaatgaccagtgatgatgagctgtttttcatttgtttgttggctgcataaatgtcttcttttgaaaagtgtctgctcatatccttcgcccactttttgatggggttgcttgtttttttcttgtacatttgttcatgttccttgtagattctggatgttagccctttgccagatggatagattgcaaaaattttctcccattctgtagcttgcctgttcactctgataatagtttcttttgctgtgcagaagctctttagtttacttagatcccatttgtcaattttggcatttgttgcaattgcttttggtgttttagtcataaagtctttgcccatgcctatgtcctgaatggtattgtctaggttttcttctagggttgttatggttttaggtcttacatttacatctttaattcatattgagttaatttttgtataaggggtaaggaaggggtccagttttagttttctgcatatggctagccagttttcccaacaccatttattaaatagggaatcctttccccattgcttatttttgtcaggtttctcaaagatcagatggttgtagatgtgtggtgttatttctgaggcctcagttctgttccattggtctatatatctgttttcatatcagtaccatgctgttttggttactgtagcactgtagtacagtttgaagtcaggtagcatgatgcctctagctttgctcttttttgcttaggattgtcttggctatacgagctgttttttggttccatatgaaatttaaagtcatttttttctaattctgtgaaaaaagtcaatggtagctcgatgggaatagcattgattctataaattactttgggcagtgtggccattttcacgatattgattattcctatccatgagagtggaatgttttttgtttgtgtcctctctcttatttccttgagcagtggttcgtagttctcctcaaagaggtccttcacatcccttgtaagttgtattcctaggtattttattctcttagtagcaattgtgaatgggagttcactcatgatttggctttctgattgtcgattattgatgtataggaatgcttgtgatttttgcatattgattttgtatcctgagactttgtcgaatttgcttattagcttaaggagttttggggctgagatgatgaggttttctaaatatacaatcatgtcatctgtaaacagaaacaatttgacttcctctcttcctatttgaataccctttatttctttctcttgcctgattgccccagcctgtacttcccatactatgttgaatagaagtggtgagagagggcattcttgtcttgctctggttttcaaagagaatgcttccagcttttgtccattcagtatgatactggctgtgtcataaatagctcttactattttgagctacatttcatcaatacctagtttattgagtgtttttagcatgaagggtgttgaattttattgaaggccttttctgcatctattgagataattgtggtttttgtcattggttctgtttatgtgatggattacgtttattgatttccatatgttgaaccagccttgcatcccagggatgaagctgacttgatcatggtggataagatttttaatgtgctgctgcattcggttagccagtattttattgaggatttttgcatcgatgtgttcatcagggatattgaactgaaattttctttttttgttgtgtctctgccaggttttggtatcaggatgatgctggcctcataaaatgagttagggaggagtccctctttttctattgtttggaatagttttagaaggaatggtatcagctcctcttgtacctctggtagaattcggctgtgaatccatctggtccttggcttttttgggttggcaggctattaattactgcctcaatttcggaacttgttattggtctattcagggattcaacttcttcctggactagacttgggagggtgtatgtgtccaagaatttatccatttcttctagattttctagtttattcgcatggaggtgtttatagtattcgctgatggtagtttgtatttctgtgggatcagggtattcccttcttcattttttattgtgtctatttgattcttctctcttttcttctttattaatctactctatctgttttgttaatgttttaaaaaaaacagctccttgattcactgattttttgaagggtgttttgtgtctctatttccttcagttctgctctgatcttagttacttcttgtcttctgctatcttttgaatttgtttgctctagcttctctagttcttttgtgattttagggtgtctattttagatctttcctgctgtctcctgtgggcattagtgctataaatttccctctaaacactgctttaaatgtgtcccagagattctgtaaattgtgtctttgttctcattggtttcaaaaacttatttatttctgccttaatttcattatttacccagtagtcattcaggagcaggttgttcagtttccatgtagatgtgcagttttgagtgagtttcttaatcctgagttctaatttgattgcactgtgatctgagagactgttatgatttccattcttttgcatttgctgaggagtgttttacttccaattatgtggtcagtttgagaataagtgagatatggtgctgagaagaatgtatattctgttgatttggggtggagagttctgtagatgtctattaggtctgcttggtccagagctgagttcaagtcctgaatatccttgttaattttctgtctcattgatgtatcaaatattgacagtgggatattaaagtctcccactattattgtgtgggtgtctaaatgtctttgtaggtctctaagaacttgctttatgaatctgggtgctcttgtattgagggcatatatatttaggatagttagctctttttgttttattgatgcctttaccattatgcaatgcccttctttgtcttttttgatctttgttggtttaaagtctgttttatcagagactaggattgcaacaactgctttttttttttttttgctttccatttgcttggtagatcttcctccatccctttattttgagcctatgtgtatcttttcatgtgagatgggtctcctgaatacaacacaccgatgggtcttgactctttatccaatttgccagtctgtgtcttttaattggggcatttagcccatttacatttaaggttaatattgttatgtgtgaattcgatcctgtcattatgatgctagctggttatgttgcccattagttgatgcagtttcttcatagtgtcaatagtttttacattttggcgtgtttttgctgtgtctggtaccagtttttcctttccatatttagtacttccttcaggagctcttgtaaggcaggcctggtggtgacaaaatatctgcatttgcttgtctgtaaaggattttatttatcttcatttatgaagctttttttggctggatatgaaattctgggttgaaaattcttttctttaagaatgttgaatgttggtcctcactctcttctggcttgtacggtttctgaagagagatctgctgttagtctgatgggcttctctttgtgggtaacccaatctttctctctggctgccttaacatttttcacttcatttcaaccttggtgaatctggcgattgtgtgtcttggggttgctcttctcgaggagtatctttgtggtgctctctgtatttcctgaatttgaatattggcctgtctttctaagttggggaagttctcctggataatatcctgaagtgtgttttccaacttggttccattctccccatcactttaggtacaccaatcaaacgtaggtttggtcttttcaacatagtcccatatttcttggagggtttgttcattctttttcactcttttttctctaatcttgtcttcatactttatttcattaagttgatcttcaatctctgaaatcctttcttctggttgattgattcagctcttgatacttctgtatgcttcatgaagttctcgtgttgtgtttttcagctccatcaggtcatttatgttcttctctaaactggttattctagttagcagttcctgcaaccttttatcaagtttcttagctttcttgcattgggttagaacatgctcttttagcatggaggagtttgttattacccgccatctgaagcctacttctgtcaattcgtcaaactcattctccatccagttttgttgccttgctggcgaggagatgtcattctttggaggagaagagacattctggtttttggagttttcagcttttttgcgctgttttttcctcattttcatggatttatctaccttgatcttggatgttggtgaccttctgatgggatttttgcatgctcatcctttttgttgatgttgatcctgttgctttctgtttgttagttttccttttgacagtcaggccactcttctgcaggtctgctggagtttgctggaggtccactccagatcctgttttcgtgggtatcaccagtggagactgcagaacagcaaagattgctgcctgctccttcctctggaagcttcatcccagaggggcacctgccagatgccagccagagctctcctgtatgaggtgtctgtcgacccctgctgggaggtgtctccccatcaggaggcacgggggtcagcgacccacttgaggaggcagtctgtcccttagcagagctcaagcgctgtgctgggagatccactgctctcttcagagccggcaggcaggaatgtttaagtctgctgaagctgtgcccacagctgccccttccccccggtgctctgtcccagggagatgggagttttatctataagcccctgactggggctgctgtctttctttcagagatgtcctgcacagagaggaagaatctagagagaataagtgaccttttgtgattttattctttaacttagcatatgctttcaaggtttatccatgttgctgcatgtcttagtatgtcattcctcttcatagcctaataatattccactgtatgtatagatcataccttgcttttccattcatcagttgatagatgtttggattgtttctacctttcagatagtgtgaatgctgttataaacatttgtgcacaaatttttgtgtgaacatatgttttcatttctcttgagtaaatacctaggagtggaatagctgggtcatatagtaacttatgtttgactgtttgaggagctgcctatctattttccaaagtggcttcaccattttgcatttccacctgcagtgtatgaggtttacaattcctctacattctcataaacatttgttatctgatttttgattttagctatccttatgagtgcaaagttgtatttcattatagttttgatttgcatttccctgaggataaattatgctgagctccttttgatgtgcttattggcaatttgaatatctgctttggagaaattctttatatattctaaactcaaggcccttatcagatatgtaatttgcaaatatttttcccattctgtgggttatctttttactttcttgataatgtcctttgaagcataaaaggttttaatttttatgaagtccaatatatctattttttcttttgtttctcatgcttttgatactatgcttaagaagccaatgcaaaatctgatgtcattaagatttatccctatgttttattataaaagctttataggtatttttaggctttcaaaccattttgagttaatttttgtatatggtgtgaagtagggttcaacttcattgttttctgtgtgtggctatccagttgtttcagcattatttgttgaaaagatgcttctttcctcattatcacacttgttgaaaatcagttgaccacagatacatgggcttgtttctggactctctcttttccattggtctataggtctatcctgttccagtaccacattatcttgattgatgtggacttgtagtgaacttttatttttattttatttatttatttttagagatgagatttcactgtgttcaccaggctggcctcaaactcctgtcctcaagcgatcctcccatctcagcctcccaaagtgctgggattacaggcgtgagccattgcgtccagcctgtagtaagttttgaaagaaaaacgtgtgttctcctactttatttttcaggattgttttggctattctggatccttcatatttccacatgaatgttaagatcagcttgtcaatttctacaaaaaagtaggttgggattctgataaggattgtgttggatctgtagaccagtttgggggaatagtgccatcttaagaatgttaaatcttctggtccatgaaaatgggaaaattttcaatttgtttagatcttctttcatttaacatttttttgtagttttcagagtataaatttgcacttcttttgttaaatttatttttatttttagtgttcattccaagtgtgtggaaatgtaatagatttttgtatattgaactgtactctcaagcttgctgaacttgctcagtagtttgaatagttttttagtgggttccttaggattttctatgtacaagaacatgccatttgtcaatagagatagttttacttcattctttccaatttggattgtttttattacttaattgtcctgactaaaaattttagtacaacgttgagtagaaatggtgataggagatatccttgtgttattcttgatctactggggacagcatctaaccatcctcattaattgtgacattggctgtggctttcggttttgctaaatatgatgttagctatgggttttgcatccatgctctttatcaggttgataaagttccctactattcctagttttttgagtacctttttaaataaaagaattttagattttaccaaattcctttttttttatcatcttgagaggattatgtggttttcttttttattttattgatattgtgttgtattaaattaattgacattcagatattaaaccaaccttgtattcatgggataaatcccacttggtcaacatgaataatgctttctatatgttgctggtttcagtttgctagtattttcttaagggatttttgtgtccatatacgtaagatatatttgatctgtgtttttttcttgtgatgtctttgtctggtgtcgatatcagggtaattttttattactaatttaatctgtttagttgttataggtatcttgaaatgctccattatttttgggccagttttggtaatttttatgtcttctaggagtttgtctttttcatcatataaacctagtttataggcacacattttttcatagtattctttaatattcctttttatttctataaagttgctagtaatgttccttccttcatttctgattctagtaatttgagtttcctttttcagtctccggtccagctgactaaatagacttgagaagttttcagctattctttctttgaatatttttttctgctgttttctctttctcctctccttctgctatccctattacatgtatgcggtgtgcttaatgatggcttacatttctctgaggctctgttcattttttaaatgttattttcatttaatttttctctgttcttcagattccataatttatattaatctattttcaaatttgctaaatctgcttcttcaaatctactgttaatcccctctagggtaatttttctttcaattgttgtacttttgaataataaaatttccatttggttctttttaataatttctgtttattgatatcttctatttgatgcaacattatcatgttactttcttgtacttatttaatcatggtttgtttaatcatgtttctttgaacatatttgtaatggttacaccaaatgctttgcctgttaagtttgacatctgatggccataacaagcagtttctgatacctttttttttttggtttgtttttggtatacttgtcatagttttctgttctattgcatgtctcactttttttgaaactggacatcttagataatacattgtagaaactctggatattggtcttcctcacaaccaccgaggcttgttattgtcatctgcttgtacagttgttgagtgactggatggattattttggtgcagttgattcctcttctttgccatggggtatagcctttgacagggaaaaggtgggttttggttcaaatatcagacttttacttttcttccccagttttagtagtttaaaaattatttcttcatttatgatatgcccttaatactatttccagagcctctaaatattttttaaaaataattttcaccagtttccatggagtgggcccttggaactccttgtgctgttatgccacccatagtggtctatttctgttgttttaagccatcaaatttgtatccattagttacaccaactacaagaaacgaatacatagctaagtattttaaaaacatatgtatacatttttatttattaagaaatggcataaatttggtacatttctgactcagaacatttgaatgttaataaagatattgaactcattcacagtattctccctctaaacagctgtcatgcactcctatatctccactctaactagagacttcttactaagaaggaggcaaagccataaacccaaagggttccgagaagagtctacctgggttccagtacccataacctggaagacaagcccattaacctttcagaggctcaacttcctcatctgataaggtagggtgtggaccatgtggtggatgaacatattttgttttcaacctgcttagcatttgttccattgggttgattggttatctcccatggacctcctctccctagcaacaacgaataaaatgttgacaacatggcatacaaaaggctaatgtggatagttccctagaactcatttgtgaaggttggtaggaagaagctgtctttccaccttggttgtaagatgggggaatgaatatcaacattttctgcatttattttcgctatcatatactgaaggtttatatgcagcaggaaagattaaagccatgaagagatgagagaatttcagagagccacagtcttggtaacattaagccctaaatccaatcctttagtccctggttccaaaagttctgccttgaatactgtgaggaacccagaatcctctgcaggtacagaatcaatcaactcatatttttggttgaaattaatgcatttgatcttctttcttgtaagtaaatgttcttcactaatatagaacatactggactgggcccagaccaaccccacctctttattccctactatgtacactcctgaaatctccctgagttaggttcctcatctgtacagtgagtacaagcatccagcaattcaaatgttgctgtgtagataatatagatgaaatgtttggaatatagtagatgcccaataaatgttagcattattgtattaccaatttaataatttctcaggctggatattgcccaaatttcacagggcaccacaagtagcaaaacactaagaaaaaggctttggatgcagggaaacatagatttgtacttgcagttcaacacactacaacacactgtgggatgtgcgacttttatcattcttgtagcccttaggacattgttgatttaagcaaattggcttagcaaggagatgttttctttcacattattagaggtccagaggtgagattggaacaaggagcagtatggttgtgcagattgtcaatccacacttgttacatatctgcattcatctagactttttctcaaccttattcccctcatggtcataagatgcctgcttaaagcacctggagcaacacagttgcttgtttccagccaacaaagggaagaattactttagattaccagatttttctgcaagcctgtctttttctctgatagacccaaactggccaagttcagcccatatttgagtaaacctctagcagggaacatggaattatcctagttggcttaggttagtcatgggggtggattaaatattgagaaatcaaccaaaatagctcttatcactcatcactcaaccttttcaagtctttttttcttcctgtaaaatacctaactcacagcttgctgagagaattaaaaagatcaaatgtatgttgtaccttcaataatatttggcacatagcaattattgaatgaatagaagacataactgctgagatgatattatacaccagggggtatggggtataggagacatactcaccagtaacaaacacctgagtgccccgacctgattggtactccttgatagctcttccttttatgaacttcacgcagtaataggtgccagcatcagcaagagagatttcacggatgcgggtggaaaagtctgtgttgccaggcttggtggtgtctccaatctcttttactctgggaaagttaccttgtttgaaattgtagattaatttccggtttggccctgttcccttgaaccacaagacaggtccatttggtaaggtattgggtacgctgcaactcaagatgattgactccccagttgatacagtctgtgacatctccgtttgttgcacatggaacacatgtgtgactcctggaaaaaagctgaaaatcatttctcatttcccctgttctggcttaagcatgggtacgggtcacggttgggcctcattcattaattcttttaatgacatgcgcaaatgcccatgcattgagtaaagagaggcctttgcacatggaggcagcttctccctagagtgctgaaggaagggagttagtccagaagaccagatgtattcctcctcagttccattcctcagccctcaaccgtggtaagaggaggacagggagagagaaggggcaattatcaatgggtaatgttcttggagaaagactagtttccctatccatctaattgcctagagtcactcggtacatttggaactgggttcaagtcctgtccttcaaccctacatctccactgagtttggggttggccttcctctctcctctgaagggtgattagcctctgaatttgtacagaaattcatgctgagagatgcacagaagaagttaaaacaattaaagaatgaggtggtcttggcaacagcatatggttccactacttatctcttcaagagagagaagggagagggtttcctctcctcaacaaaaagagattagaacctcaagggccctctacaattttggaggttctcaccagccaccctttaccctcctacacagtcatcatcactaccctacaatgtgtcaggtcctggtaataatctctcctattaagcttggttgtcaaaaccacagactgcctaaggagcaggttagagagaaagggaactcctggctggcagggccaggaggtaatggtaggaaggcagcctgcattgacattatgtaacttaagggaaacctgtggattttccattgccattttggcattatggaatgtgtctggattcaagggaaacattactgggaaggtcagttctcctggtagaactgagggacacctaataccactgtatttcatgacgttaattcagagggtggtgaggagaaggaaatactggttatcctgggaataaaaatactgggaattaaagaacagtggggctgggcatggaagtctcaggacagacctgggaaagttcaagtgtcagggaatgactcaacccctatgggaaggctttttgcaaaaaagactttggagagattgatacacaagacccctcattctggtctaagaattccctaacaacagtgccaggccatggtaggagatcacatccactcattgacttgtatggggaatgggagtgtgatctcagactggactgtggtgaccactcaggtacttgctatcaggtccccatcacattccagttggtaatgggaaggtgactgggatcatggaggcatgtagagattctacctgcctgaagagccctttgttttggcccaggagatactgggcattttggggaaaacttcacctatgttgagattccatcagaagctaagatgtggctactagcatctgtgactggaagttcagggtcatggaataagtcataatatacacaatgcatatacctgggcccaggtttcttcgtaaaaccttagaagtcagtcagccttctaggacccagttttcttaccatttaggccatgcagtgcacacatgtagttgcaccttgcatatccagtatctttttatttgtaaatgtctcctatgtcattgggttctggtggggttggcatcagagaaggatgtggcttgtcaacatagcttgattcagtatttggcacaggttgtccagaatggcttactagaaaggctattagaagaaacctagtctacagggtagttcgtggataaaggagcatggtgttcagtatgtagtgatgatttggtacatggtgaagggttttaaagattcatcttcataaacccagggaataaagtgcatcaggctgtgctcaccattcacatacacggtggtgcctggaccagagaaaaactccatgtcagggtgtcctacccttaacttcacacagtagtaggtgccagcatcctctggcaacacgtcactgatgcgaatggaatagtcagtttgatcaaccattgtgttttccactggagttactctggggaagtggcttccattgcaactaaagattaattgttgtcctggcccaatgctcttgaaccacaagacaggcccttctggggacagagcagacatattgcaggccagggttaggacatctccgggattgactgacactaaagtctgaggctatttcacctggaactcttcttctggagttcctggaaataaacatggaatcatctcttatgttctctgtcttggctcaagatgctctgagggtctggttataggtcaaggtgggatctcagtatgatagctttatttcagcatcatgtgatggcaccagtcatataaaaattacaatgctgggtgccatgtgaggtgaaggggaggtaccagtgtacaaataggagaatgacactttccttctgcatcgggatatgaggatggcctgcaatatattaggcactaaataaacatattttaaataaatatatgagtatatttttattaaatgagaaaatgcaaaatagaatttgggtcagatttttctaattgtctcaaaatcagggatactgccccaagctaaggacagtatgttgataaccaacatactgcatatggagtgacctgcatatggaggcagctccctcccataccgggtgttctgtggtgtgaaaggccactcattcacctctcccagagtaaacactgaggcatgcattctcaatgaagttgctattttccataaaaggtcacaactggtttttggagtgtaggattatcttagatattacaatggttggtttgtcaatgatcaattctaccaaacaaaatcttattccttagtacttaattgctcttgtgtattcttgggtagcacacaagccacactgacattgagttcatggcagatacacaaaatgtctacaagataagttctacaaaattgcagttattcacaatagccaaaatatagaaacaactgaagtgcccatcaatgtataaaggaataaaaatgtgattatacacacacatacacacacacaaacatgcagtagaatactatttagcttttgaaaatcagaaaattctgtcacttatgacaccatggatattatggtgtgaaataagccaggcacagaaagacaaataccacatgatcttgcttatatgtggaatgtcgcttatatgtggaatccaaaaaagtcaaactcaaagaagtaaagaatagaatgttgttaccagggtctggggtggtggagagttggacaaggaaatgggagatgctggtcaaagcctataaagttgtagttagacatgaggaataggttctggtgatctattgcacagcatggtgactatagttaatgcatacttcaaactagctaaaagagtagattttaaatgttcttaccacaaagaagtgataagtatgtgaggtgatggatatgttaattagcctgatttgatcatttcactgtgtagacatgtataagaacatcacattataccacataaatatatacaattattatttgtcaattaaaaccaagataaaatttaaaaaaccatcaagttgtacacctttaaaaacaaataagttctacaaaacaatggaggactttattttgaatggttttgccatcttactcggtatattccttttctatcgctgaataacaaattacgacaaacttagaggctgaatacaacacatattaattatttcacaatttttgtccatttgtaattcagatatagcttagctgggttctctgcttcaaggtctcaccaagctccactcaaggtgccagctgggctgtgttctcatctgggggtttgactggggaagtgttcattctaagttcactcaggttgttggcagaattcaggtctttgtggttgtaggactgaggccctcaacttctaggggcttccctcagttcattgccatgtgggccttctcacaggcagtttgcaacatggctccttgcttctttaaggccagaagttgcaaaaaaactctagtgtgatagatcttacacaacctaacatactcaagggggagacagtgcatcactttggccatattctatcagatagaagcatgtcacacacaactgagattacataagggtgggatagttgggagtcaccttacagtctgtgtacctcacccaataagtacagttaaaaattcaagtgagttttactagctttaagtatcttaagttagcttttacctaaatatttttagtcatccttaactctccattgaataaaaagaggaagctttatagttacccttcctatgtataaagcacagacagatataaatgcagtacataaaccaacaaagaatatatctaagttattaaaatttcatgttgaggctattatgagttgaattgtatgcctccgaaatatatgttgaagtcttaaccacaagtagctcagaatgtgaccttacttggaaatagagttacagaggaaatcaagttaaaatgaggtcattgaggtgggtgctaatccaatatggtggatgtttttataggaagtggaaatttggacacagagacagacatacatgggagtaagatgatgtgaggatacagggagggtggtgccacctgccatccaacaaatgtttgaggctaccactgctagaagctcagagacagacatggaacagattcaacctcacagtcctcagaaagaaccaaccctgcccacacttcgattttgaatatctagtctccagacctgtgagaaaattaatttctgtaatttaaaccacccagtttgcagtactttttaagagcagccaaatgcagtggcaacagagaaataaaaaactgaatttcacagaaagaagtgtaaaatctgccaggggccaggtgtggtggctcacgcctataatgcgagcactttgggaggccgaggcaggtggaactcttgagctcataagtttgagaccagcctgggcaacatggtgaaaccccatctctacaaaaaagacaaaaattagctgggcatggtggcgcgtgcttgtagtcccagctacttgggagttggaggcacgagaatcacttgagcccaggaggtggaagttgtagtgagccaagatcgcaccactgcactccagcctaggtgacagagtgagaccctgtctcaaaaaaataagtaaaggtaaaaataaaataaaataaattacaccctccagaggctggagggtgagagctgtgatggatgctgtgccccgccctgtgaccataggtgtgagtcgtttacctgagcaaagagatttgcaacagacatggccaccgggagactttgtcagaattggggaccatcccagtgtagtcttctgagttctgcctgttctgggataagatggagaaaaccctcccaaaagaaattctatgggaacaggtgagggagagttcactaaacaggcagaggggagaacccaccacacacatacactgaggccccactcacctgccagttcaagcagcagatacagcagtaaggaaggcagaggtgggtggagtggggaggcagggatgggcattgtggtgaaacctggagcttgctctgcctgaatgcctgtcctggagatgccctcgactcagtgctccgagcagagaagacagttcttgcctctgtgatgtcagaggaaggggattgtgatgagaggaaaggccaggggactgggacactttttcctttgtgattataaaattgaacagacaaggttgcttcaagctaggaagttgctgctggaagtatttagctttgctggggctggggggcttgacacccacagccttatactccttcctgagtttcatcccatctcacaggttctccccaacttcatggcctttgcctatctaggagcctcagacacataggctagacaaaggcctcatccacatgatgcgcaggtatgggtctagctcctgcatgagctcaacatctgggcctgtctgagctgcacagctgaagaaagagacaagatgtctatagcctcacccacttggtaagagttggactttacaatggatgccctttcttgcactccagagtagttagaggtaaaaaacaagcaatatctgctgtgggctcttggcttttctgtgggtccctccatacactaccaggaactgcttcctttttccttcctgcagaggaatcaggcatggctgagaaagacattcgagttgtgcaggtggtgatgatttgtgctttagaggatggaggaggcctgcagggaaggcggagctgcggggaacactctctaggagggagagtaacatgcctacaaacacctgggaaggtgagggctgcctctcctgcttgggctggacctgggaccagctctcagagatgggattggaggggcagaagaaatgcccccagaaagagggaggaagcagcatgttggcatccttctctctcagctctggaatgggttcttcctaagcacaaatgttgtgttcagggacactcagcccacactcagctggtgaccctttaatgtccaagcatccacaggcaggcactggctgccatggctgtttccccattgcctcctcatgacttctgcctcctcctcaggaaccagctagatgtcagggccgggagaggtgttagaccctctaggaaaagaaagcagagccaggctggcacgttctctctgagacgacaagagtccccatccccttgtgatgtcatcatcctatcccgttgttctgaaatgatgaattccacaaaggaattcctatccatggcccctgcttggaactagacaggaacattcctccagcctccatcatcctccccttcccctactctgaggaatcttctcacctttcattagactctaagttccttggagagtcagtactcacgggtcagtatccaagagtgccagctttggaatcagatataatctaggctagaatcctgaacgcacctcctaagagctgagtaatcttgggcccatgatacagacctgtatattctgcaaccttcttgacatcttcatttgtatatatatatatatatgtattttttttttcgagacagagtttcgctcttgttgcccaggctggagtgcaatggtatgacctcggctcactgcaacctctgcctcccgagttcaagtgattctcctgcctcagcctcccgagtagctgagactacaggcgcccaccaccacgcctggctaatttttgtatttttaatagagacagggtttcaccatattggttaggctggtctcgaacttctgacctcagatgatccacctgcctcagcctcccaaagtgctgggatttcaggtgtgagccactgagcctggcctctttgtataccttaaatattcaagtttgagtttcagatctgcactcacaaaccttatcttctcccacaccatgcctgttttgtatatggtaccatcatctaagcagtttgtcaaaccaggaagggactcatgttctataccctcacttatccacttgttaccaagtgaaagggggttgctgcctgatgtgctagaagccaatactgtgacaccaggcttttgagaaaagaaaagctttttattgcaagttgactaacaggaagacagaagtctacctcaaatctagctccatgtgctggcttcaaggcagtagttttattagcaaaagtttaggggttggattctgggattagtatgtgatttgtgaaaggaaaggggaggtctggaaagtccttgggcatgtacagttatctctctatgcctcttcacggctcccatgtgcaaaaccctggggcgtcatcatgaaatacgtggtagaaactcaggctgtgacatcagcaagctcattctgagcaaactccagttggccatattggttccaacagattttagtcagttttgttatcctacaagtggaggaagtttcggcagtttagcaattttttttttttcttatctgctatcctgtaaactcaagaatttcttagtgactggtttctttaactctttgggggcatagtttcacactcctatcttgcccctaccaggccctattggatttacctcctaaatcccttctgaattaatctctttctccatctctatcatcatctcttgcctgaataagaacaattgccttctcactagggtacccccatttttatttgccccctataatctctttctccttcttcagccagactggtctttttacaacatagatttaattatgtccctctcttgaataaacatttttgtggattctcattaatctggaggtactataaacaaggctttcttctgtgactgacttgctcccttagagatgaagggatccccacctttctgatacgtagcatagcttcactgtcccaggttgggttccctgggagacagactctggggtgaagatgaacaagcaggttatctttcagggagtacttttaggatcaacacttgtggacgggagaagatggaagcaggactgggtagaagaagaagctgggctgcaatgaagtcccattgaagacctcagctgaccttgcatggagcctggtactaggatattcctccagagttgctctgagttaggataagagagctgggcctttatacgactaggttgatgagtccaatgagatgtggtttgttaccagatacgacctaagcaagggcactcccttcagctgagacaatcgcaaatagagctgatgctgaggaccatctccacagccaggtgcctctcagcatccattacacaattcatgggaacaacttgttcctgtgaagacttgggctcaggacattattcactcactcatagtcaggtcctcaaagctatcccagctcacccacataacccaaagttttctgatcccacttggtctgacctggattttactaatgggaaaagtttagggtgagcatcacgggggattgagaagccacttcctctgggatctgagtgcctagatctggggtgagctctggtagtggacagaggaaggacgagaggaaaggaaacctcaggcttttgaagtgagataaaactttggaatatcaacaaagtctccctaccgcacatttccttgcattgttccccacggggtacaagaggcaaataaaacctagctgaggacaagacgttaattttttctaatagacttaattttttaaggacagctttagatttacagaaaaattgagccctatcattagcatcttacattgatatgatacattattataatcaatgaaccaatattgatacattatgattaatcaaagttcatagtttatttagatcttttctttttacctaatgtcgtttttctcttccagcatcccatccaggatacctgttacatttacttgtcatatctcctcaagcttctcttggctatgacagttttttagactttccttgattttgatgaccttgacagttttgaggagttctgggcccgatgttgcagaatgcctccttattgaaatttgtctgatgttttcctcatgattagattggggttgtgagttttggggggaaggtaatagaggaaaagtgtcatcttcatcacatcatattaaaggtacatattagtgacatgatttatgattcttgatgttgatttataactgttgatgaactcttgatcacctggctgaagctgtatttgtcagatttttccactgtaaagttattttttctccttttttccatgctgtactctttgcaaagaagtcgcagtgcacagcccacacttcaggagtggaagttatgttccacctcctttagagtggagtgtataaataaattatctgggactcttctgcactggagattcttctcttctttcccattaatttattcaatcatttatttatatcagtatggactcagatatttattttatactttggactataactcattactactttacttatttttttgctgaaagtgttccagctttggcctttgggagctctttcagttggttcctgcgcctctttgatgtactccagtcactgtgggttttggttttggggttgacttttttttcttgttagcactttcttactttctagaggatgttgaatttttgatggaatgttttaaacagaaagaagagagagtagtctttaaagaaagagcttgagaatacagcacacaagccaagtgatcaaatgaagagaagttttcttttgaaatccaacacctagtagaaaccaatgacctcaatgatgtattcactcatttaaaaaaattgacagcctattatatggcagacacagttctggcaactgaggatacagataatcctcccccacccccaaccccccacgatataactgacattccatttgcgtaacatagataaatacaggcagttctcactttggtgatgacatgcatgcatttctcttaccatagtttagttaagtaacatcagtcccacaacacaagtctcaaaatttaggtgccatagtaaatttaatgtaatttgcatagagtacaaacttctgggctagctcttcagtccacaaatcaccatggtaataaaagctcgtcatgatcagtaaccagtcatgttgtgtctttcaaagtctgttggtgattggtccctatggctctcctactcaaacagcaaatcctatagttgggttgcctccttgcctcccagtgatgagcccatatgacattttacagaaatgaataattgaaagaggaattttgcaaccaagatgaaagtgcagtgaagaaatgagaagtgaaaatgctgcaagtgaggttcaaattgaatgtgagtggaattctagaagtacaaatagttgactgtggcaatgtagaccctgatgcaggaacttcagataggcagccagagggaggtagtaaacgcaaactgccacaaatgggagaggagtggtaataaaagggctgaagatgtcccaaaggttgaaatgccagcaaaaaacttcacatgaaaggatcttctggagtgattccacaatattgaaaattcaagggataagatgttggaagctagtccaaacttagaaagatggcaaaacaccaaggtataatagaaatgatgcttgctggctaggcatggtggctcatgcctgtaatcccagcactttgggaggccaagacaggtggatcacctgaggtcgggagttcaagactagtctgatcaacatggagaaaccccatctctactaaaaatacaaaattagctgggtgtggtggtacatgcctgtaatcccagctactcaggaggctgaggcaggagaatcacttgaaccctggaggcgggggttgcagtgagccaagatcacgacattgcactccagcctgggcaataagggtgaaactccatctcaaaaaaataaaaataaaataaacaaatgaaaagaaacaatgcttgctccgtgtattagcccattctcacactgctataaagaactaccagaaactggatattttatgaataaaagaggtttaattggactcacagttccacaggcttaacaggaagcatgactgggaggcctcaggaaacttacaaccatggtggaaggagaaaaggaagcaggcaccttcttcacatggtggcaggagggagagagagagagagagcgaagggggacttgccacacactttcaaaaaaccagatctcatgagaactcactgagatcttatgagaactcactatcacaagaacagcaagggggaagtccgcccccatgattcagtcacctcctaccaggcccatcccacaacacatgcagattacaatttaagatgagatttggatggagacacagagccaaactatatcactccatattagaaatatacaaaaaaaggcaagcactcttccaactactctggatacatttttacaaagaaacagcacttgaactctcaatgtttctaatgctttgaattgtagtgcacaaataaatatttatttcattatattttcattgtcctctacatttgtaactgagagtgtgagagtttctaatattttgacaaaaaatggtaaaggtcacagaatgatcattgtttttctgattgactatggagactgctttcctgggtttcaggttgcacagtcatttttgcaatcttgcactgccatgaaaagtgagggctgcctgtattcggcataatactcatcaaaataagggctaaagaaaaattaattaggataagagaaattagaatgccgggatagagaaaataaataatattttatacaaggtagtttatagaaggtgcctttaatgaagtgacattgagcagagacttgaaggagggagagcgggagccatgcagctgtgttggggaagaagcagagaagtgatatgatttgacttttccaaagaatcactgtggctgaaaaatgaaagccagaggagtggtccccaaagagatgatgctggctgggacagggaggggtggtggaggtgagaggtgtggagaatagggatttaactctgaggtttccagcagcaggcttggactgggccctgaaaaccaattgttaaatttcaggaatcttgcaatctggttgtttaactgttggcagtgtgaaattggtcaggttgggagttattacactagagaaattggcaagcactgcaaaacagcttttggtttttccctttcagaaagtccattgttaaacatttaccatctcatgtaagtggacacatgcattttggaggcagaactgaatatgagttgtaaagggcagtcatcgagggctcctcaatgttgggctgtggcagcatttctaccacaagcagcaggactgggaaggctgcaggatactagaagaaatactgtctccatcacagagagagaagggagagcttctttctttttgggtttgagggataggatgcttggacaaagaggaaagagaatcatttttttcttaaaattggtataggggttcatgtgtattcaggaggcagtagagaacctcaacaaggctgggggagttggggtaggcaggaatccagaagacaggataactcttgagagcctggagagagtctgtggtttatggccagtcccaaggcgacggatgggagaagtcctggtgtgtttagatttggagtgtttctcaccttctagggaggtgccatgagtcagtgcccagagcccaatcccatggcccctgctcaggaccgtgaatagagacactgctttggggcatcatggtcttgtgaaggtggaacaggagcgtgtgggcaggcagatgacctgggagaggaggcgtttggagctgagtgtggggaaggttctcgccagctccttctctcaggctgagcttctcaagaaaggaggaggcagcagagactgagggtcctacatggcagggaaggaaggaaggagctgttggaaaacacatccacattcattcatctgctcatcatttaagaaatgtttcctgagagcctgatatgtccctagtgctggtctcctcttgggatgcctgttatgggtggacaggcagacctgagataggactctgccagctcagcacttcttccaagtcctgatgctccctcttccccgctttccactcaagcacacagaaggtcagagcaggaacagccctcagagcagcctatctgggaattctcaacactacggtggggattactttgaacccatggagtcccagcagtggcctccaagggaccacccactcagttggccctcacttagacccctctgtccaccttttccatgggactcctaggccactggggacaactttgaacccccttgaagcatcccacctcctgtaatacccttgaccatcccaactcctgcacactccctgggggttgggagccccatacagggttccctgagactcctgagtatcctgagggagccctgtcaccttctgtaaactccactgaccctgaagctgcatggcatgtgagctgggccctcctgctggccttgcctttctggaggagcccttggtcagtcctccctctcctaaacttacagtcaggccttctgtttccagcagatgtagatggcagagacaccaaccaccagtagcagcttggggcccaggaggagagctacgaggagtggagcagtaggagccagcgctgcttctggaaatcagggaagaggaggagccatgagaggggccacctgggagctcatcccaggggcctccacttaccccatctgaggctacctgggcccatcaatcctctgaagcttttgaacttgcatcctgctctggctttcctgactccagccgaaagcaaaggccagggaaagtggctcctcattctcactcaccctgtcccaggctgccagtttatcctcctggagggaaaaggtggagagagtgtgtgctcaggtattcatatatgtggcaactgggttcctcacttgatcctcacacgcccatggggcagggattattattccattctgatggggaaactgaggccagagagtttagggagtgtcaggagattagtaggatccaaacctagggaagcccatcattatgtccccaagggtgactcctgagtccaagacaagtccaacactccaggatcatgagaatgattagtaaagggtgggcaggtggtgtgaggatggattcagagtgagagagttgcatgctgcccttcttagccccaggggcagggagaggaccccatattctcatgatctcagggagccctccagggacaagacccaattaaacctgctggctggaaaattccctggtgagtcagggaatgtgcctcgggcttggaagggcctcagacatcatctctcctacctcaaccccagtgcagatgtcatctgaaatctttctgttggacacagagagtcagatctacggaagctcatgttgggactgtttgcattttttaaataaggggttttggatgttaaaagtaacaaaggtattaaaaaaaattttttttaaaataaaatggtgctggtgggtccttaaggaaggaatggagacctcagcatctatagccgctggagtgttggagtgttgcaggccggcagttctcagatgggtggctctctggggctttctctcctttgaggagagctgcactgcccaagtttattccttctaaggggcagcccacatgagagatagactgcattgggaatatgaagggccagcccttcccctcaatttgaaaaaaatctacaggaccctccggccttttgcctctctgcaagagcagctgcatctttgtactgcctgcactgtggctcagcacctccctcctcctacactcctgcctcctcattcctgaggcatgttgaccctgacagcactctaggatgcctcctgcattgctttatgcatcctcaggtggcctcccagagaaactgtccttgggaagtggtctggaaagaagactctaaaatataagttgggaatctgattactcatcagctagcaatgaggaccccagggctggtggtgaatgggactggagaagccgtgacttgctgttgtgttgcgattgataacactttcactggcactaaactgggatagtgttaccacaggaaggaaattccttgccattagccttttgaaaacagattgggaaatggtcgttataagaactaaggtgttagctgttgctgggcatgaactcttgggaggaaggcaatgagaaactaagagtgattcatcatgagttaaagttcagctggaagccagaggacttcttggcagcactgcagattcttatttcttggagccacagggcagaaggaatagagaattgggtcctgggcatcatagaagagtagcagaatcacagcggagcatgaatctcagtttcaatggctgctatgctgggatagggccctgatggggaagttgtgggaccctgaaatgtggaaggagacatttgggtcaaaccactcaaagattgtcagttgacttcagagttactggggacaattgcagtggcatcgctacttgtcgctataaatatcctccccaagccaaaagaagaaacagaaaaggaaaagtaaattctacacaatccaggccctaaatattgcttgaagagagaatgccaaactgcaaaatggctgagtcaaaagggaacactcacctaaccctagggcacagtctctcactaggctcccatgccactgatgcagcacgtcacagaaggcatcctgcagtttgcctgccagcctagacaacctaaaatgcatttccagacttagcatatgtgccaggatgccatgtcagacacactgaaagaacccaaaaatggcagccctctctcagccccagtgggtggttggaagtctaagaaaagactcaaccttgtccagatggtacagactcatctcatcctgtgcctccttgagaagtacaactatgaacccaagaaatatcatgaggagcaggcataggagaacttccaaggtggaagagcgaggtaagaacctgaggactgaggaacagcccagcagccaaacagcagggactctatgcccaaataccagcccccagccacagaaagtgatgaagggaggacatagaaaagaggaggtctcaagtcaataaatataaatcccgcacttaaagaaactacaaaaagtagggcaaagtaaacccaaagaaagcaggagataggaattaatttaaaaaaaaaaagagagaagagagcagataattaatgaaactgaaaacacaaaaacaatacaaaaacccattgaaacaaagagtcaatcttttgaaaacaccaataaaatgggaaaaaactctagcatgactgatgaaaaagaaaagagaaatgacacatttttagtatcaggatgaaacgtgggataccattgcagaccctgcagacaccaaaagggttatgagaggatattatgaacaactctacacacataaatatgacaacttagatgaaatggaccaaaagttatgcaaaacacaacttaccagggctcactcaataggaaacgaaaaatgtgaataaccctaaactattaacgacattgaatctatgattataaaatatccaaaaatatccctggggcccagatctttcaaaggaaaacacaagcatttaaagataaattaaaaccaaatttaacacacaggaaaatggttctaaaaaatttggtaaaatgtgaatgtatgctccattttagatgatatgaggaaattattttaataactttatgaaatttagtgatttgaacacttaaaatttaagtggacaatgacactggttttgtgaaaaatgtccttgatcacatgatccctcaatgtgcaactgcaggtgcatgcgtgagcaagttttcagtggacgtgactatgcaccttccacacatctctgatgattggggacattgtttgtcttctatttcgtgtctttcctcttctggcaggcagggacatgaacaaatccgtgactcagcactgacccaggagatgacgcaaacatcatagggtgttttggaaggaacctgagtccttattcttatttcctggagcctcagggcagaaagaatagaagattgggccccagccatcattagaagagtagcagaatcacaaaggatgttgaatgtcagctttaatggcttctatgctggggttgggccctgatggggaagttgtgggaccctgagatgtgggaggatgtattcgggtcaaagcactcaaagattgtctttcgactggagtagagggacccctcctggtattaaaagagagggaaataagacatattttggttatagagagggggaacactggccaaatttgggtccttgggacaaagcgcagcagaaagggaaagtttctctaattagcacaaattcccattatagcctggtagtgagcctgtcctcagggactagatttaccttcattactttggaccaataacctggtctaatgacaagaagtcttcaacaacatccctcattacttcctaagtcctggtttcccctttggtaaaactccaagctcactgggtgtttgaagcaggaaaggagatcagagatgaacagaaatttgcatatagtaaatgtgcagagtggttgtgattattgttggtcaaatatcaccatcagaacacaaaagaagcctgtgctgtgaccaggtcacctgggggtctgtccaggcttaaacttcacttgtctttctgaaatttatagagcagatgctggagactggtggctgaggtcacagatgcggatggaaaagtttaggatagaatagggacaaggtagaggttagaaagtgtaaaaggcaaggtgctgtgctggcgagaaatgcagaagaaggcgagacacaggacttcataaacaaacggatcacctccctctctcttttttcctttaatgtatatttatgtcaaaatatctatcaagttgtgcatcagacttgacgcacagtttctcctggtagatggggcttaagggtgtctacaaatggccaattgttaccttgaaccttctaagtagtggtgacccatggagtgtaggattttaatgtagacgttaaaattctactttatatttatagacttctagcttattttatgacaagcatgaatattgcttttaacattaaagaaaaagacaaaatttaaaaatgggaagtaaccgcaccatgggtgatatctgagccgtgctccttctggtgcgctgagatctccagggcatagcttttgctgactgcttgctgcccatcatgctccacctgacaggtgagcaccacatcgtccctgtgggcacaggtgttcaccaggagccagctcatccagttgtaggtgccatccttgttctctatgagggtcgaagctgtttctgtccgggacacatttccattctccaaccaggtcagctgtagtccccgggggtagaaattgctcacctggcaggtgacgtttgcctggttctctgccctcatgggctgttgagtaacctccaaggtgggtggaactgaaacagcacagggcagaagctctgatcttgtggcacagacagatcacagggagggctaaataacgtagctcccaccaacacagtgagggcatcaccaggacagtgctaggcaggcagcaggtgctcagacattgagggcactcgttgcatatgagtgaaattactaagcacagtgcctggcgcacagtaggtgcccaaggactgttagctgctgctaggctaaggatgagtgaaatctacaagcacaacccctggcatgcagttggaatgtaagaactgtagcaaaatcagtgaaatcgccgagcacatagtgatttggctcctagtaggtgctcactaattgtagttgctcttggtgaaataaatgaaactctgtagcccagagcttggcacatggttgctggtcccctgacagctgccattaaaatgatagtaagtgaccggctcacctaggtgcatgggaggtggacaacacagttaggaattagattccaggcctttcaagctctggagcctggggagaggggagtgggcttggcagccaggtgtgggcttgggctgggtgtgagggtcttctacctcggatggcctcagacaagttggcagtcccacgaagagggtccccctgcaaggtgatgtgggctatctcgcagatgacttgagagtgaacgtccccacgggtcagcaccaccctggctgtgctgtggatgctgtaggacacactgtctcctgcggggtccacgttggtctggaagtctgagagctcattcccatttttgaaccatttcagggtgatgtctctgggagagaagccatgggactcgcaggtgaagctcactgtgtgctcaggtgtggccctcaccgcagggcccgataccacgggggcagagggtttggctacaaaaggaccatcgataatcaggagacatgactcagatgaccatcactgatgataagcgtttgacatgttaagaaccttctgagacgttagtttttaatctttctaataatgtcgtgaaggcagtgtccttattctcattttacagatcaggacacaacagctcttagaggtgagaaccaggccatggtcagacagtgagtaggggcagggcccagagggaagtccaggcctgagttcaaagtcctctccacacagggagacttccaccaatctgggcataggaacaaaattactgattggtctccctccatgttattaactggtcctagctgtcctcccccggaaggctcactaacctcagagagggcatttatagaagccaatacagggatcaatggcaaagtggcaccaccgtgagagctgcaaccaggctgctcagcccaggacaggggtgggctgacaaccccagctcctcatccgcaaaacaggaggacggaggacggcgtttctacttcctgggatgtcgccaggattcaatggggcaatggaagcagttttgctctggatcaaacacagaagatgcttcccccaaaaaacacagatctatctttaacccagactttacagatacacagaggtctctctttaggtattataaaaatatgaaacattccgtatttttcttttcacaaatatttcgttctgtcaaataaaaggcattaattaaggataaagctttaacgtagagccaagagtttgtaagagcattggaatcacacctgctaaaggtcaagccacaggatgttgcagtagatagacctggataacaactgaagccagggtccgtgggattttgatctctttcacctggagtactttaatgaaataaccaatgagagtgggtttgcagttgaggattttcaaccagctaatgaactgtttccaaaaacaaccttttgtgaaaatcccctataaaaaacctgtcctgtattgccatacgggacactattcagggtttcactgactcagtgtacccaaattgcacctctttatctttcagataaatgctatttcctttggccttcctaacaatcattttgctgttgttgttagttgttctaatctgctggaagtcctaaatttgaaaagaggaaatttttgggaatctgaatcttcagttaggacaggtttgggtgaaaaacaaggatcactgagtactaagaaagccaaaggtggttagctttttcatcgttaattaattacaagagacaaagacccaggccacaccaacagacagaaacctattctgggccttgaaagcaaacacattggagaatcagaacaacgagtgcagtttctccatgtagatgaattttaagggtgtctgcaaattgctaattgttaccttgaaccttctgccgtcctcttagaaagcacatattatacgtttgactttgccaatattaacttgctccctgatatgcgtgaaataatgtgagagcacagtaaggagggtgtcacttgaagatgtcaagtctttgagacaccagcagcatgggtgtccctagaaggctgagaggctgtcttcagttccgattttttgagggcttcttggcagcctgatgctggctgctctctctgtacctctcagcacttcaatcctccttctatttgtcagagggggtcctcatgtgagcccttgtgtagggcgagactctgagaggatccttggtggccaagggccaaaagtagatagaaaccccaccctgggaagatgagtgagggtaagtgcaagggcatagcctggcatgtagtaggtgcttaataaataacccctgtgactgtaatcatgaggtttggtcattactgcttctggagctgcatagctattctttaggcaacagaacaaagaggcacacaaacaccaaggaaaggctcaaaccctactcaccgcagctgccagaaaaaacccaaatgataaaaggagcagcaaccaccatgtttggcgaactggctttcaagtaagatcacaggggaagctggaagcattttggaagaaggagggaaaagatacctcagtgacatctgggagtgctgagggagggaggcttctggggctgaggagtgaggatttgctgggactccagcacgtgtttagatacaaatgttttcaagacagaaggttccccagccctgaggctgcatctgagccaggctttgtcccagtctcctatcttgggccctgaggccagtagcatgggaggggtcctgttcaggcttctggggcctcccagaatgtttccagaatggctgttttgaagcacccatgacccaaaaagctgttctcaaagccccaaaacctggggcaccgcttttgctagggggctgtgtatgagaatcttctggagccattaagaactttagatatccaggcccaaattagatgcaattaaattggcattttaggggggttcctgggtccagctttgcaaactttttttttgatagttttcccaatgattctaatgagcagccaaggttgaaagccactggactccaacccaaaccccatttatacttggggcctagagatgccctgacctgtctgaggtcacacagcttcaccctaacacaactcacctttattgagcatttactgtgtgcttgttgatgccctaagcattttacacaatatcactccttcagactcggcccagtctgtgaggtcagtgttaccatcaaagggtgaggacatcgaggcctatggtggtgaagcaccttgtcccaggtcacagagccaggaagtggcagagccgggaagaggcccaggcagctgggatactgcctgtgttctcctaacgacagttctgcagaagctcagtaataacctgaatgacaccaccattaggggctctgtgcacatcctctccaatcctcacagaacccagaataggccatgataatcagcatctcaccgatggggaaaccgaggactcaagggaaggcaagactggcccaagatcacacgatcttgaaataacacctcactttgggggtgcctacagtgtgctaggtgatttacagagagaaccttacgcttacgactttcctaaaggagtccatgattgtctctattctacagatgaagatgccgtggctgaacaaaatgaaggcactgtctcccgattctccatgtgtcccagtgggcatttcctgtgtcccaccaagcacttatgtccattaacagagcaagtgttctaacttcttgagctccaacactgactgccacctcaattgtccctttgagattctagacttcatgcaatgttagggagaagcctccctcctgggtgcccaggcctggttaccctgcagccataagcaaaagacagtgggctcctgacagccggaggggagaatctcaactcttgctcacatgggccccaaacactctctaggaaatgcctcatctcctcatccttagtcctcagcaccatgaacgggcagatacgtgctctgctgggctgcaggaggctcgactctgctcattggacgctgctgagtgaagaggaaacaacacaacatgggggaagagtcctaaatgcctcatgtgtgttgagacctgtcctttaggaaccggcttggcatatcatgagacatgcgcagggcctttctgatgggagtgtgaagacaggccctcctacccctacagggttcttgttttgtttttaatgctttttgctgtagaactgaacaatgcaagagtttagaaagagaaggttggagcatttctccactcttgaaaaaccacagttgagtgtcacaaagacaaaggctgtgagtcaggctgcggggttccagccttggctccctgacctgctcccaagtcaggtctcctctctgagcttcagtgtcctcatctttaaaggaggtagcaaatggcttctccctcatagcactggttataaggagactctggcacagttgctgctctctggcccccttccccacctccctcctttctcatgtagctcatcatttaggccgagagcatggcaaagaggagtgagtacttcactaggagtgagcagatctgagtcacacctgagccaccactggctgtggctgcctgggctggggaggcaccacctgggcatttcagtgtctttgccaatattatctgcacaatcaggataaagccaccttccttgtctaagttcaagggttgtggggagctgatttcagtcattactgagcaatgtacattttcatgtacatacatgtacatgaaagcatcatgttttaggctttacatatacacatttttttaaaaagctgttagtaaagctatgtgtcttctggaggttctgtttttttgcctttccaaattccagaggctgcccacattcctttctcacagttacatcttcccatcactctaacctcttgcttatatcctcacaagtccttctctgagaattaatctccttcctctgtcttgtaaggacctttcttatgtattgtgtccaccctgatgctagagccagatgttaaaaccactgtcttaaaaatgtttgaagtggggccaggcatggtggctcacgcctgtaatcccagcagtttgggaggctgaggcgggtggatcacctgagtttgggagttcgagaccagcctgaacaacatggagaaaccctgtctctacaaaatacaaaattagccaggcatggtagctcaagtctgtaatctctgattgctacatcatctagaagggaaattaggcaatattctcaaatatgaaaacacactatcctctgacctagaaacaccacttccagtgggaatctcccacctgagtagggtgacacatgtacaaggtcatccactgcatgattgttgtagtagctcaatgttgggaataacttacatatccatcaacagaagactgtaaaataaattttggtatttccataaattggagtatttttcagctgtaaaaaaactggagcagttctctatgtcctgatgtggaatctcgatatgaaatgacagggcttacatttgggagaagttttctagtcaccaatgagctttagtatctgaatgtgaggtgcattcttaacatttgggaaactgatgaaaagagaaatgctggctctctgacacctggctctgtttggggaacttttatctagcacctatgatgcaccaggctcttctatggagacagcgtctaatgctggggaaggaaggagactgccacgattcagatatggactctggctccaattctgtcactaactggccctgtgaccatggacaaggcccctgtcatgtcttggcttcagtctcccatctgtaaagggggttgggctggatggtctgaaggtccttcctgtgctgacatgccagaattcagcagttaagacgaggcttttggggctctggcaggaaaccccacataagcattgttgctaccttatatggggaacccctaagtcacccacttgtgggacctctttcctgaggtgagggacattctgagatgatgcagctctgctcggagcccatggtaactctgtgactcagtccccaaatcacagaagggtttcccaaatagacccacagcaaatgccaaacatattggcatctcctcccaccaagccatcagattcaaccgtgaatgtgcctccgagaaatcttccccgtggggtgtttctgaagattaaattaaaaaaaaaaacaaccacgatttaccctctccatgccctggacggatttctcctcattagaagggaagagaatgtaagcttggtgggggagcgctttaggctgtttcattcactgctgtttgcgcagcatccagggcagagcctggcacacagtggggtctcagtgactgcctgttgcataaagaagggacttggccaccctgagggggaagcattctctggaggcagaaggcaaggtccagccctgtgcctggacaagtcactcaaattgtgagttccctcatctgtggaaccaaagggctgggtcagctttggaaacacaagagctgtagagccgcagactggggatgccttctgtcccatcatttacaagccgtggagcctcgagcgactgccatgacatctccaagcctcaactcatgtgatctggagaaagggtgacatcagttcatgaaagggtggctgctcagccaccaccacacctggctgttgctccaagaatggataatgtaattattgagttattgtcacacaccaggggacaaaggaggcccacgctgtactcaccgcgcacagacagctcagtgcctgctccagacttaaactccacgtcgtcagggctccctttccggaacttcacacagtagtaggtgccggcgtctgctggggtgatgttactgatgctgatggaaaagtccaggttgtttctctttgtgagttctgaaacagttgttacccgtgggaagtggccttctttctgattgtagattaattcccggcctgctccagctcctctaaaccacatgatgggccccacagggatcagggacgtcatagcacagcgcagagtggccgactctccagctgcaactgatacggacttttcaggctgaatcacctgtagctcgtcctcacctgccactcctggaaaggagcacaaagcagtcatttcttcatccttacctgattctctgtgtttcctcaagtgtttatcaatggctttcattgactgggtgcacaccaggaaaaggccttgagctcagcccactacatgtattatctcatttaaccctcacaactggcctgtgacgtaagactgtaatacaagcgagaacactgaggcacagagaggttcaatttccttttccttactttcttctgttctttctgtttgctttcttttcttttcttttttgagacggggtcttgctctgtctgctgcccaggctggagtgcagtggtgcaatcacagctcactgtagcctcaatcttccaggctcaagagatcctttctccttggcctgccaagtagctgggaccacaggtgcattccaccatacctggccaatttttgtattttttctagagacacagtttcaccatgttgcccacagtggtctctaactcttgggctcaagcaaaccatctgccttggcctttcaaattgctgggattataggtgtcagccaccgcgcctggccaagaggttcaatttcaatgtagagctttgggttgaggacctgagtagaactattgagccctcctcggaagtgccatgttttgccaattatggcctccactctgtggtacatggagtgtggcactttttgtatcactggattgggtggggccctgtgacttctttagacccttgagttatgagcagaatgatgggtataatttgtgggctgtgcatttaactgcaagagcctctgtggatcaatttctcccttccggagaccacgaggctctgatagggcctgctccatcgcctggatgcgtgaatgaccgttgcatgcagaactgccaatccacactgaatatgtagcttccagtagaaatataaccttgttttaagcccctggtaatttttcacccatagcataatcacattacctaagtttcctaatgctgatgtgacaaattaccaaaacttagtgtgttaaaagaaatgtaacattttatagttctggaggttagaagtccaaaatagtgttactggggtacaatgaagaagaaatgatgaacgtcaaatacacaaagatagagaataaaacagtggtgactaggggtgaacttgggggagttgatggggaggtcaaaagacacaaaattgtgataagtctgaggaagaagtccagagaatgaatgtgcaatctgaggattttagttaataatgttgtattgaattcagtatttttgcttaagaagcacattttaggtgctgttgacatacaacacatgcagcataactatgggagatgatggatgtgtccatttgcttaactttaataaccatttcactacgtatatgtacatgtatacatatatgaaagcaccatgttttacaccttccatgtctacattttttaaggcgctttcagcagagctgtgtgtcttctggaggctctgttttttgcctttccaaattctagaggtttctcccatccctttctcacagttacatcttcccaccactctaacctcttgcatcttcacctgcaaacatcctggaatacaaggatgtttcaatgtccttctccaagaattaatcttcctccttcttataagcacccttgtgatgtattagctccaccctgatactagacccagatattaaaatcactgccttaaaaatgctgagaggtaaaggaaataacggaccaagaactaaaggaatataaatgtcttaacaaaatgagaatgtaaagaaagagaaattataggaagaaatcaaacagaaacttaggaattgaaagtacaataactaaaagttcactagaggggtccccccaatgggtataagccggtggaagaataatcagaaaactggaagatggaataattgaaattattgagactgaggtgtgggtggaaaatagaataaagtatagagcacagaatctaagggaattgtgagacattatcaaatgtatcaacatacaccttactagagttccagggggaaaaaagagaaagagagaaaggaatagaagattatatgaaaacagagtggacaaaaatcttcacaaacttgttaaaatacaggaatctacaaattgaagacacagaagaaacgcaagttgaacccacaaataaactcagagacccacactaagacacattataatccaaatgttgacacctaaagtccaggtgagactccttaaagcagcaagacagaagcgatttcttccatacaagagaccctcaataagattttcagctcagctcttatgcaatgcaccgaaggccagaagatagggggatggtaagttcaaaatgttgaaagaggaaaaacatgtcaatcatgaattctatacctggcaaagtgtccttcaaatacaagggagaaattatgatattctcagataaacaaaagctaacagagttcatgaccattaaaccttgcctacaagaaatgctaaagggagtgcttcaggtggaaatgaaaggatgctatatggcaactcaaagttgtatgaagaaataaagatatccagttatgtgtacattttttaaaaatcatgcttcaatatcccacaaacaagctgtgagcaccctgcccaggtgaccaggtaaccagtattttaaagctggtccctgccacaattcctcttcttgtcttcccctactgtgacctagtgacattgaaacactctagtaaaagtgtttttgcttgtgtcctccaccttgactcccagtaaaggcacttgcccagggatcccatctctcttgcctacccatctgcttgattgagcctgctccttgggagctccttccacatggcttcctgcatggcctgccctacttctgtctctaggaactgtgagtatgcctcttcatatgaacttttcatggccatgttagagtgatcctctaagattcaaccagcaggagtcactctaacattttctatagtaatggcaatgaggatgggatcattctaaactcaggtggaaagttcctagggaatgcctttgactcatgacttactgatttgctactctgattggctccacaatttgagaaggctttttaccctgatgactttcttgtgctatgctatgtacagctttgtgttgccttttggagtgctgccatggctctccatcctgaagcgaggatcctgttccaatatcaataatgacatccacctttctccaagagcacaagatgatataacattggtaacacctcttcaaagaagattcatgtgatatgcatattaatgtcacataatccagcacctgtaagttttttttgggatgcctgtggcaacatattcttcatttacaaattttacttacaaattaaaatcaacagacactcctgttagtgtcattaaatgaattaaacaaaaatatctctcctctgtaaagactttggctgtgtctttcatgcctcttggagtctctagaccactcatgatggctatatatttcctcagggccttgatgcaaaaataatgctctttatggcctacgctgtactccattaaaacaactgactggttacccactagaatctcctgatttggattccagatttgaagataataccctcctgtttcaatcattaaccataaattgccccacaggccaggctctgctcatctgaaatgacacccatcggaatttaaacttccactgcaacacaaaattaaaattgctgccaggtacagctgcacacctttctgttgacagttggcattattactacttggtttgttgatgcaacaatcctcaaccaaatactagcaaactgaattgaacagcatattagaagaattatacaacacgagcaagtgatatttatttctggaatacaaggatgtttccatgcacaaatgacaaacaatgtaatatatcatatttatagaagaaagacaagaaacacatgattagctcatttgatacagaagacgatttgacaaatttggggatctttttatgacaaaaaccatcaataaaaggaatatatgaaaacttctataaaataataaaagtcgtaaacacacacttgattttcacttatcgctgtctaatatactattttatttgcctatttatcatgtgtattgattactgtcattctccccagtggagataagcaacaaaagggcaactactttttgtcttttattcaacaatgttctttgttaggtcctggcacatagcaggtattcatcaaatatgtgtataatgtgtgaattgcttagtggaacactttctcaggagactaaatattgtattttaagtgaattgctttcatgaaatttgccagaaaatgtgtttcccatgtgaattggtgaaaaaaaatcgacttgtatacatgcagaaatcagaagagtcaaggagaagaaaaccacaaatcctcttctccccaccacatcacctccctgccctcatgagcagcatctgcggaaatttcatggaataagatcaagggcaaaagtgtttgagaagagtaatggtgaaacctgtgatctctagagtcaaagtgcctgagttcaaatcgtagctctaccagttaccaatgagtaacctaggagcactttgtgcttctgtttccttatttgtgagggagggtgaacttggatataatggttacctgatgtcagaaatgtaagtgatttcctacagtatctggcacacggtgggtattcaaaaattgtaaagtgattacttggcagatttcctgaggattggaggcttcaatggatattagatgatgatatggttatggatatggatatgaatataactatagatatagataatataggcagggttctctgttacttttatctccttctttcttcctcaaccctaccattaatggaagagagaactcaaagagaggaatgcgcaaaagttctgttttgaggaaaagtgcattttactaagaagtctgcttacctgttgctttgcttaacagattgggggattttcaggggtaaatgactgaagtagaaaggagggagaatgactgggcaacagagaaaatcaaacatctctttaatgtgtttttcctgtagactaaaaaatgagttgaagactgtagtaagggaagtcttactactactactactactactactactactactactactactactgctgctgctgctgctgtgtgtttccacatggtcaagtaagatttatcccaggaattcaaggatggtacaacattcataaatctctaaatgtggtacagtgtttcaacagaaagagggacaaaaaccatatgaccttacaacacaggcaaagaaagcatttgacaatatttaacattttttaatcataaaagctctcaagaaattagataccaaataaatgttcctcaacacaataagggccatacaggacatatccatagctaacatcatacccaatggtgaaaagttgtcaccttttactctaagatcaggaacaagacaatgatgcccactctcaagttttctattcaacatatagtatcagaagttctatccagaataattgcacaaaagaagtaaataaaaggcattcaaatcacaaaggaagaagataaattttccctgtttgcatatgacactatcttatatggagaaaatcttaaaaatctctaaaaacttttagaatcaacaaacaaataggccacagatataagatataaaattaattggtaaaaatcagtagtttcatacacttatagcaaattagtgggaaaagaaatcagtaaaacaattttacttacaattgctaccaaaaaaggtaaagcagctaggaataaacttaatcaaggagctgaaatacctacacactgaaaactataaaacttggatgaaaaaaatagaaaacaaataacagaaagatacctatgtttgtggattggagaattactattgtaaaatgtacatactacccaaagagatctacagattcaattcaatgtcagtaaaatttcaatgaaattccacagaaatggacaaaacaatccttaagttcatattagccatagaaaaccatgaatagctaaggcaagctttagcaaaaagaacaaagctggaggtatcacactgcttgatttaaaaatcttctacagtgccacagtaatcaaaacagcatggcactggcacaaaaagagacacatagaccaatggatcagaccagagagcccagcaataaactcacacatttgcactcaattgacctttgacaaaagggtcaagaagacacaatggggaaatgtcagtctcttgaaaaaggggtgttgggaaacctgaatatccatgtgtagagaaatgaaattagacctctgtctcataccacatacaaaaatcaactccaaatgtattaaagacttaaatgtaagatctgaaactgtaaaagtactagaagaaaagttccatgacattggtccgggcaatgaatttttggatatgagccccaaagcacaggcaacaaaagcagaaataaataaatggcactacaacaaactaaaaagtttctacacagccaaggaaacaatcaacagagtgaagagacagcctacaaaatgggagaagatattttcaaaccatacatctgatgaagagttaatatgcaaaatatataaggaagtcaaacaactcactcataagaaaacaacccaagtaaaatatgagccaaatagccatttctcaaaagaagacatcaaaatggccagtcaacatataaataatatccaacctcatcattcttaagataaatgcaaattaaaaccacagtgagctatcatctcacgcttgttagaataactattatcaaaaagatgataatgactatcatcaaaaagatgttggagagtatgtggagaacaggaaaccctgttcccacacagttggtgggaatgtaaattaggccatccattagcgaaaacagtatggagtgtcctcaaaattcaaaaatagaattatcatatgatccagcaatctcactactgagcgtatatccaaaggaaatgacatcagcgtgtcacagagatatccgcacccccatgtccattgcagcattatttacaatagccaagatatggaatcaacctaggtgcgtatcaacagataaatggataaagaaaatgtggtgtatacatacacaatggaattctaatcagttgtacaaaagaaggaaatcctgtcatttgcaacaatatgaattaaccaagatggtattatgctaagtgaaacaagccaggcacagaaagacaaacaccgcatgatctctctcatatgtggaatctaaaaaagttgaactcaaagaactagagtagaatgacggtttccagggctagacaaggggtgcagttcggtaagtattagtcaaaggacacaaaatttttgtttagatgggagaaattagctccagatatctattgtacaatatggagtctatagttaataagatgatttatatccttcaaaattgcgaagtgcatagattttaggagttctcgccatacaaaattgtcaatatgtaagattatgcatatgttaattagctgaagttagtcattcagaaatgtacacatatgtcataatatgttgtacatgagaagtatactgttctcaaattagaagtattttcttaagctttaattgaaattaaagttggagaaactgataaaaaatgaaatctcatgtgtgtgcgtgtacacacttacactcacttatatgcacacatgcagggatctctaatccccaggttgtggttgggtacaggtccgtggcctgttatgaactgggccgcacagccggaggtgagcagccagtgagtgagcgttatcgcctgagttctgcctcctgtcagatcagtggcagcattagattctcataggagtgccaaccctattgtgaactgtgcatgcgagggatctaggttgtgtgctccttatgagaatctaactaatgcctgatgatctgaggtggaacagtttcatcctgaaaccaacctccccacccacccactctgggtccttggaaaaattatcttccatgaaaccagtcccaggtgccaaaaagattggggaccactgcacacgtgtgtgtgcgtgtgtgtgtacacattcacaaatatatataaaactgtgacctataatatttgtcacatagaaatcatccaacagattaacaaaactttcggaatacaaacatataccagggttttaactctgttgctgactggtgtaatgggtgatgattaatcctgtgtctgctttcctgcattttctagtatttctgcaggtagcataagaaggctaaaagtaggaactctgaagctggtcgacctggacttgaatcccatctgctccactgattgaggtagggaacgatagacaagttcctctctcagcctgcctccccatttgcaaatagggaatatgagttgtagctttcacacagggatgttgtgaggattagtggagttaaaacacacagaatgctaagaacagtttttgcgttataggaagatctcaattgctgaactattactgctgtcatttgaatacagtgtatggtaagaaaaatgatttggaaagtgaaatttctgccctctaggacttgtgaggtggcatcacagcagggcccagtggggagctgagaggctgctgtgcccagcgctgtgaccctggtgtcagctccatggcctgagtaaggagtgaggacaggaagcctatctgggagctgggagcaaagactttccaacctgcccctcctgaggaagggaaaataaattctccatggcaaagtcaagagacccaagggagattatggtacctgttatgggctgaatgtgtcccctaaaaggcatgtgttgaagctccaaccctagcaacacagaatgtgactgtatttggagacagagtttttaagaagcaattcagttaaatgagttcattggggtgggccttaatccaatacgattgatggtctcataagaagaggagatgaggacacagacacacacacagagggaagaccatgggttgagacacagggtggagactgtcttctacaagccaaggataaagacctcagtagaaattaaccctgctgacactttgatcttggacttcggcttccataactgcaaggaagtaaatgtctagtttcagccacccagtctgtggttctttactatggaagccctaggaaatgaatataggccccaataagcagcaaatgcagaacttgttaaagaggaagaggtgaccaaaaaaatgggtgttaagactcaagtcacaggggagggaggatcatgggggaacacaggacaaaataaggagcacccttagggaggacggtggctgaacatccctgggaaacactgcacccctgtccaactcaagcaggcaccatttcagacttcacttcctctgggtattgaatacagaaggctgggcctggagccacacagccctctcaggctgtctctgagctcactctgtccttgggtaggttgtttagccccagagtctcaagactggtaaggatttaaatagtgattgttctgtgttagtcaaatgaaatagatcaaaatgtaagtaattgtggtggtgagtcaatcatcctgtgacttgatgcctctggtagccagctgctgatccacagagaaagtgctcagctccatgatgtcctgctcttaggccccatctctggccttccttggcagcacttgtggttgtctggaatccccaaaggtccagggacaggatatagccctgccagcggagagaaagggttctagcccaaggcaatgcttacctgtgagtcccagcaatagagtcagcagcaggaaaggacaaggagggtggggccaggaggctgggacaggcatcctggagacctcaggagcctgctctgttcaaacgtctgtggtggggagatgtcaggctctgctctgaggagagaagacaagccctgcctccctcagttcaagaggaagtggctatgatggattgcgacagcaacttgcttctagattgtaacttagaaatcaggcacagcaggcagctacaaagcacagagttactcatactccattttcaggagaatcagacaggctgagcaaaaataatgcttcctcttcaactgaggcctgtgttctgtccacgtggcccccttccccatcttcaggtcttcttgatgatttgccagttgagggtcttgggccaagaaggtctgtggttgtgagttgtgtcctaaactcttcatctcaggaccctaggatgtggttggcttgttgcttcgttctgcaccagcctcaaccaagtgctactcagcagggggcaacaggagggatcgcaggagcctcttgatgttggagaggaaacaggtatgctcttgaaatgattccttattcaaaccttttaatgatataactggcaaaacgtagctcaaattcagtctgatctgaactttggtactttcatgggcctgaatccagcagaagaaatcatttcccaacttcttccaggagagggagtagttttagtttagtaaggatctgttttgtcgggtgaagtgaggatcatgggttatggaaaagggatagggttatgattcgggcagaatgtggcggacaggttcctgaggtcatcacatcaactttaatatcctttgttctgcacagaggacctacttcattcaccactgtgttcagatgggaaatgaggagagaggaagtatatatgccctgaccaacaaggtgtgctaaggagttggggaaatcattgcagccatctacgctcaattttgttctctaaactgggggttataagtatttcattgcagtgttttagtggagattaaaggagataatgattgtaccatgcctgaaacccagtaggtcattattgatgctaatgacaccaggtgaagagcgggaactcgagtggtgcttttgaatgaatccctactacatggtgaattgcccaccagtggctttctcccagcaacccaggcctcctgagacccagattatatgatgtgcttggactacccctgccactctgagatcaattgctttctcttgaattctctgcatcctgctccttataatccacaaattaatttgttctctcacaatttccagctgtgtgactttcaagaagacacttgacttctctgagccttattttgatggtatgtaaatggaagttataacatgcaccaacatgcaccttgtagagatggggtaggaataatataaaccataatgaatgcttgactcataattaattttaaccaaaaaatgtggctataatttttttttatgagaagggctcactgctttcctgccacagttgtgctttagaaaaaccaccttgttaggagaaatgtttgtatcatctatgacttagaaaggcctgtctggaagcttccctgtcacatgctaggttttaggtccttcatctgttattgtcaaatgaaatgtaaaggttatcatattctcattcaaagttctgttcaatgtggcaaatgtgcacagggtgaaatcttcccctcctactccacacccacaaaaatgaaaatgaaaaaggataaaattatattattccgtgtcaaattacacttaaaaacaagacaatagtctttatgtgacatgaaggaatagcagcagttatcatttattgcagaagtcctgtgccccagatatggtgtcaagcattttatgtcagttacctcattaattcatcactctgactctatcaagtaagcactgctattaacctacctccttttacaggcgaggaaacctgaggcacacagagagtaatggatttgctcaagatcactaagcttttagaactagagcataggttgccacacaccacagacttcacttttaatgtttgcactatgacatctgtcattggaaaggagagacatccctcaggaggaagcagagaagaagccatagcctcagttaggaacagcccgcacagtgaggctgtggcaggtgccatgctccaggaggccctgataactccatcacgtggggtggggctttatttctggaaagatggcagtgcaggaaggaatcactgaagatgtggggaacagcagcaccatgagagatagctaaccaattcaagaaaaacaataactcaaaaacaagaacagcaatcaagaggacttcacaactgagaaaatatgaaaaaataaaatataaaaaggtctttaaaattagcatacacagtaaccttataaagatagcaaaagggaagtgaatccataaaataacatcaggcatgtgtgaaacaggaatagtcaggcatgaagtaacaggtatcttggaaaaataaccaaaaaaagagactttggaaatgaaaacataattactgaggacagttttaaaaaatgtaataggttgactaggggactatatatatataagtagtaagttattgggttgggggatcatgtggggaaatcccttaggattcagcacagagacacacctaaacagagtaaggtaaataggtgtaaatataggaataacaaaagatatctcacaaaacatgtcaaaaaatttcccagaaacagctgaggagctgagcacttgcagagagggtggtggtgcccagggttggctctgaaggcacagtgatgatgatactgaagatatttcactgtttgatttagaagggagggcagacaactaatagaccaaagaaatttaaactcagagatccagtggcctcacttttcctttaattatttcaagtcagtgcaatcgccacctattttctctatgaaccgcccagcagttgctttcttgcctgtgtggcctgtgtggtgacaatgatctcgttgtcaggtggcttttgggcagtgaagaatgtcaccggtagagtaatgattggactatgttggtggaatcacattgatgacaatggaaagggccattgggcatttgagtcctgggagacatcctcttaagagagtaaaactgtcttagaggctgaaagaagaatcttctggttgggactaatggcctgtccagtgctgtgagtgatatgtgcttttagtgcctgatttgatttggctctgtgtccccacccaaatctcatctcaaattacaatccccatgtgtcaagggagtgacctggtgggaggtgattggatcacatgggtggttcctgcatgctgttctcatgatagtgagtgagttatcaagatctgatggtttaaaagcgtttggcagttcccgccttgctctttctctctcctgctgccatgtaagacattccttgtttccccttcaccttctgccatgattgtaagtttcctcaggcctccccagccatgcagaactgtgagtcaattacacctcttttatttataaattacccagtctcaggcagttttgtttgtttgtttgtttgtttgtttgtttttgacacggagtctcactctgtcacccaggctggagtgcaatggcatgatctcggctcactgcaacctctgcctcctgggttcaagcgattctcccacctcagcctcctgagtagctgggattacaggcacccaccatcatgcccagctaatttttgtattttagtagagctggggtttcaccatgttggccaggctggtcttgaactcctgacctcaggtgatccgcccgcctcagcctctcaaagttctggaattacaagcatgagccattgcgcccggcctcaggtagttctttatagtagtatgagaatggactaatacagtgccctcttctccttcagagtaaagtggttgaacgctagacatgatcagacttctcaaatagagggagaaaatttatgtgttttacgatgttggggggcaacctaagagattcttgactctgaaccttttagatctcagtttatgttgcaacagaaagtgttggcttttttccccccacttaataactttatttaaaacaaacaaaagtagttttcatattaagtttttattttctctccagcacttggggctagaaagtgtgttgtcactacaaacgtccaaatttatttaatggtatacagaggtatgcacaaggtcatgtaatatcagtatatcccaaattaaccaaagtgtgtttattgatatatgtaatgaaggcctttgctatttgatccatagaacatagtatgttcttagtctatttcaaagctctatgtgtttacatattatttctgtagattattttcagaagcaagttttgtttccacagtatgagtgagcacgttggctaatgtgtaagttagaaataattgataatttttaatatgtacttcatggtaaaatttcttagacatacataaatgagtaaaaacgaaatttagggaattggtattagtttctaaagttttgtttattttcatttgtaagaagtcatttacttaaggtccaattattataaatgaattatcatagtttatgtttaaggaatacccagaaattgtgctgttctacttattttataagaggatagccagattttactttggagcctcctggagctcttcaatgctctttggcctaatgatatctatcttttattactaaaaacgcattatttttatgttttaatgagaataatcatttacatacttcacataatgggtaaagacattttgttttatgaatctatattttttcttactataatgagaatgttatagattatgcatttgtattaatggcatttcttaaagcagtagatttaattataaactaaagcaacctagaaactactgtaggtatctgtaaattgtgttgtaggtactatagacttagtggagtctcttaatcagattatgttgtgaatacatttgtacattattaaaatatatttcaagatgttttgctgattttaataggtgtctttattggagtgataactttaaaggtacaaaactttatatttgtataagagtctactgtttacgaaggaaaaaggaaaaaaaacccagaaatattaatatctaaagatttataatttaaggtaaaacataccagtggttgaaagaggaatatttccttccatgaaaatagcaattggcttggaaggtgtgagacataaagtttcatgcctccaaaaatcatagtttggaatacaggactccaaaattgatgcaataggccaggtgcggtggctcacacttgtaaccccaacattttgggaggctgaggcaggtggatcacctgaggtcaggagttcaagatcagcctgaccaacatggagaaaccgtggctctactaaaaatacaaaattagccaggtgtggtggcgagtgcctgtaatcccagctactcgggggctgaggcaggagagtcacttgaacccgggaggtggaggttgcagtgagctgagattgcgccattgcactccagcctgggcaacaagagcgaaactccgtctcaaaaaaacaaacaaacaaacaaaaaattattttaactgatgcaatagtgtcaggaagatggcaggatccgtgcttggagcagcaagttgccttcccaaggaaggaactgtcaaggagttctcaaggaactccaatccttcaatgaagatatgctagatgcatagatgcttattcaagtaaaaaatttttgtagaaatcacgtgcagaattcattttcaactttagattgacttggtgcaacatggataaaattggaatatttgaaagaacggggagcctggaagtccatgagctaaaactccccccttcatctaccatatttcgcccccactcacgacattagatgcagatgacgagggaagactttgggacacatgaggaactgggagcccatggatgcctctccagaagactaaagattaggcctgtgggcttaggattaaaacttcctagtctgaaatcaagctctaccagctcccaagtgtgtgaccctggggacactattaacttctctgtttcttgagtttcctcaactgtaaaatggacataataatcacaccaacctcataagattgttatgggaattaaatgaactgatatatgcaaagtgcctaatagtatctgactgtatcctcaaacctagatattcagttttactattattattatacatattagctagacattattgttgttaggtagaattttagtaatagcaacaattttaaaaaacagatcctctgccctcaaggatttatgatgttatgtgacaacctcggccaatgtctgggggaggtgggggtaccatggtgatgagctgaggtcatgtgcttagccctagaatcatgggtgctgagatcatgtgctcagcaccaaggtcatggtgcagccatggcctctggggagaatcactatgactagggcaaggtgcatcctaattagggtctacacagatgctcatagaaaaagtgctccaaatcttgcctcatgctgggataggagacaagaaaatgctcccaagtggaaatccagaggaacaggagagatggactgagagggagaggagacatcacatagaaatacacctgtatagagcaggctgcacacaactgtgagtcctatgagcagagaaggtggcagggcctgtccaggtgagctgggacacagggctggggatatctgtctgaatgactctcatgaagagacctcagactctatgctctgcaggggaggagaagccccaccttgccatgatgtcccaggagggaagttgctgtgggaggaaggggccatgagactggggccatcttccattgtgaaagaggaagtggacacagttgccactgctaggaagttgctgacgtctgtgcttggggttcccagacctgggagccttggacagtactggagagaggttgactgacatagagcctgctctatgtcccagagactcttacctcatgccaggggtcccatgacccttcctaatttgagagttcagacctatagggttctgtagccaaggattgagcttgcagcttcagagaccataattccaggtgtggcacatttgagggcttgtggctacagaagcctttgggggtggaaccaaatctcctgggtgacccctacaagaagtctctcaaaccaacaccaactaacaagctgagcaaatcaaaaaacaacaactgctcttagatctgtcggagaaatgaggtcatagggcaaaattagagagacagcagggtgatatggagaattacaacttcctgaattagaaacctccatgggaaagagtgctggggtcagaaaacctgcaccatgaatggtgaattgctataagttcagtgaggaccagtctgagctaaaaactcaggaggacccagtcatgggaactcccacacttctgtgaattttacctacagcagcttgattggtcctcatagtgggtatgagagaaatattcagtagtgcttcctgaagaggaaggagaaaggggaccatttcaaattataccagagtgttctcatcatcttatgcttgttccatatcagaaatatacaagaagacaagcactgttccaactatccttgctatgttttacaaagaaataataatttaatcctcaatgtttctaatcctttgaattaccataaactaaatatttttcccttctgtccacatttgcaactgataatattatattttctaatattttgacaaaaattatgaggaccacagagtagtcattatattcccctttggatgtagagttgctttccagggtttcagtattttcacagtcgtttttgtaatcttgcactaccatgcaaagtgaggactgccctgtatttagtataatatatgtagtaatataatacagtgctaaggagaaaagctaatcaaattaagagacattggaatgctagggtggagaggaaaatggatattttacatagggaggtttacataagttgcctttaataaactgaaggacagaagagtgagccacgcagctgttgcggggaagaagccgaggaatgacaggatttgacttttccaaaaaataactgaggctggaaaaatgcaatccatcagaggctctataagcggtccaggaggagatgatgctagctgggaccatggaggagtggtggaggtgagagatgtgcaggttatgagtacaactcctttgtgtgccggagcaggcttggactggctcaggagaaccaactgttaaattttcaggaattgtgtattctagttgttaaagtgttagaagcttgaaatgggccatgttggggatattcaccccatagaaattgacaaacactacaattcagccttctgttttctttcaaacatttaccatctatctcaccaggggacataagcattttgaagcagaactgaatatgagatataaacaaagaagaaatcaagaaggacttcacagctttagggctgtcacagtatttttaccatgagcaacagagttgggaaggttgcaggatgatagaaaaactagtgtttccatcacagagagaggagggagagatgctttctttctaggtgtgaggagtaggacactgtcttagtccatgtatgttgctataaaagaatacatgaggctgggtaatttataaagagaggtttatttggcttttggttctgcagactgtacaagaagcatggtacttgcatctgctgctgagggcctcagagtgcttctgctcacagtggacagtgaagtggagttggcataacatggggagagaggaagagaaaaagagaagagggagctgctaggcacttttaaacaatcagatcttgtgggtgctaatagaccaagataacaccaagtcattcatgatgaatccatccccatgacccaaacacctcccacctgaccccacctccaacataggggatgaaatttcacattgagatttgtagggaaaaaatatccaaattatatcatacgtataaacaaagaggaaggataatcatttttctccttaaaaccaggatgagtgttaatttgtattcaggaggcaatagagaatctcaacaaggctgggtaattgggtaggcaggaatccagaaggcagaataactcttgagaatctggactgcagtttgtggcttacggagagtccaagacgatggaggagaggtgtcctgatgtgtttagatttggcgtgtttcccacatcctagggaggtgtcatgagtcactccccagagccccatcccatggcctctgctcaggaccatgaatgaagactgctctggagaatcaaggactctgcaaaggagcaacaggagcctgtgggcaggaagatgtcctgggaggggaggtgtttggagctcagtctggggaagcttctcaccagccccttctctcagtcagagccattcaaggaaggaagtaggcaggagagactgggggttccatgtggcaggggaggagggaaggagctgtgggtaacatgtccatatttaatcatctgctcatcatttaagaaacatttcctgggaggctgttgtattcctggtgctggtctccttctgggatgcctgttgcaagtggagaggcagccctgagataggactctgctggctcagccctcctcctgagtcttgatgcctctctcctcattgcttccactcaggcacacagagggtcagaatgggtacagccctaagagctgcccatctgtggtttctcaacatgacttgacagtgaggattcttttgggcccatggagatcagcatcaaataatctagagatggcctgcaagggaccacccactcagtagcccctgatgcatgctcctcttctcacctcctcatgcgaccccttgggtgctgtaaaaacctttaaacaccctggctatagctcacctcctcaagcactcacacacttcctggggttgggagactcttagagtcctgactcttagagaccctgagagtcctgaggatgctgagggagctctgtcaccttctctaaactccactgaccctgatgctgcatgatatgtgggctgggccctcctcctggccctgcccttttggagcagcccttggtcaggcatccatcccccacacttacagtcaggccttctgcttccagtagacatagatgacagagacaccaaccaccagcagcaccttggggcccaggaggaaagctatgagaagtggagcagcagaagccagtgctgggcctggaaatcaggagacaggagaagttaggaaggggctacccaggatgccatcccagaggcccccacttaccccacctgaggctacctgggaccatcaatgctccaaagcttttgaaactgcatcttaccctggctaccctagctccaacccaaggcagaagccagggaaagaggttcctcattcccttaccctgtcccaggctgccaggttgtcctcccggagggacgaagtggagagaatgtgtactcatgcattcatgtgtggcacctgagtccctcacttgatcctcacaagcctgtagggcagggattattattccattctgatggggaaattgaggctcagagaatttagggagggtcacaaggttgctcgcatccaaacttagggaagcccatcattatgtcccttaggatgattcctgagactgcgtccttttgaacaagacaagtccaatttcccagggtcataggaagaattacaaaagggaaagtaggtgtcatgagtataactgagtacccccagtttgctaaaaaacagtttattttctttgttttctttcccctttccccctgctcccagtttcctacttagcccttcagaaatgcaaatataacctttcacctccccctcaccagacattccctgcagggcaagttcttctgtatactccaagacagatctctcctggagagctggcacaccaaagcatacccaccatagaaacttcacctccaggggtagcctccagactttcatccaccaggagggcatatggaaagcatgcccccttggccacgtttgcaacttacttctgctcaggatgacgccacctcaactgtcaggtagctaagtcaccaggctagtagagggacccctgcccttgttcccatccccattaccttataaaagtgtctgctttcttctccaaaggggaagcagcacatttgaaagcaggacacgttgtgtcccttccccaacctagctttggaataaattcacttttttttgtatcagacctcgcgctccttgattggattctacatgcagcaagcaactaacatgctttttggttatatgaagatggcttcagagtgagagagttgcaggctgctctgtttagccccagtggtgagggttgaccccatgttcttgagagctggggaggcccttgaggggctgggcctaatgtactgtggtggatagaaaacaccctggcatgactgtcatgcttgggagggactcagacatcaagctcacatcaaccccagagcaggtgccatctgaaatctctctgttggacacacagtcagatctggggaagcacacatttggattctttgcatttttacaatgagcatttttttgctgttaaaagcaaacaaatgaagatatgtttacttctgttttcatgtacgttttctgggaaataaaatggtgctgatgggtccttaaggaaggaatggagatctcagcatatgtggctggaaggttggaggccggcagttctcagctggggggctctctaggactttgtctcccctgaggagagctgcactctccaagtgcactcctccttctagggggcagcccatagaaagattggctgaattgaaaataggaaggccacgcctctctactcaattagcagaactctaagggactctctcagcccttggcttctctgcagaatcagctgggtctttgtcctgcctgcactgtggctcagcacgtccctctcctacacttctgcctcactccctcaggcatattgaccctgacagcactctagcatgcttcctgaactcctgtatccacctccagttggcctcctagcaaaattgacagtggaaatggtctgaaaagcagactctaaaatgcaagtttggaaactgaccactcatcaagatcagctggcaatgaggaccccagggctggtagtgaatggagctgggcaggccctggcttgcagctatggtgcaattaataaaactttcactgtcagtgaagcgggaaggaaattccttggcatcaggcatttgaaaccggattgggaaatgatagttatgaggactaacgtgtttgatggctgttgctgggcatcaattctttggggaaagacgatgagaagctaagagtaacttatcatgaattaaggctcggtgtaaaaaccagaggacttcttggcagcagtgtagattgttatctcctggagccagagggcagaaagaatagaagattgggttccagaacattataagagtagcagaaccacagagatggatgaatctcagcttcaatgggctgctatgctgggctagggccctgatggggaagttgtgggaccctgagatgtgggagggaatgtttgggtcaaagcacttacagatcatcagccatcttctgagtttctggggacagttgcagcagcataactaattatctctataactaacctccccaaaccaaaagaagaaacaaaaaaggaaaagtaaattttgcacaaacctgactctgagtatcacttggacaaagaatgccaaactgcaaaatgactgtgggtcaaaagagaaccttcaccacaccctagtgcacaatctcactaggctgccacgctgctggtgcagtatgtcacataaggcatcttgcatgttgtgtaccagcctagacaacctaaaacgcatttcctgccatagcacatgagcaaggatgctacatccagcacactgaaagcacccaaaaatggcagccctggtcggagctctagtgagtggatggaagtctaaaaagcaaattcagcttcagatagatggtgcagattcatctcttccggctcctccttgagaagtacaactaagaactctggaaatatgaggagcaggcataggagaacttccaaggtgaaaaaggaaggcagactggctagggatctgaggactgaggaacagccgtgaggccaggcacctgggacccacccccacaatatgagctcccagccatagaacatgacaaaaaaaatgacacagaaaagagaaaaagtctgtattcaataatataaatccccacttcaagaaactacaagaagtagagcaaaataaacccgaagcaagctgcagataggaattaataaaaaagagaagagagcagaaaattaatgaaattaaaatataaaaaacaatgcaaaaaccaactgaagcagctgatcctttgaaaggatcaataaaatgggaaaaaattatagcaagtctgatgatgaagaaaaaagaaatggcacattttaaatatcaggatgaagcgagggctatcactacagaccctgcagacatcaaaaggatcataagggatattatgaacaactctacacacagaaatatgacgacatagataaaatggaccaaaaactctttgaaaagcacaagttgccagatctcacccaatatgaaatgaataatgtgaatagccctaaactattgaggaaagtgaattcataattttaaagtaccccaaaatattcttgaggtacagatatttcatagaaaaatactaccaaacatttacagataaattaataccaaatctggtgcacagaaaaacgtttacaaaagaaatttggggaaatttgaatgtatgctccattttaggtgatgtgagataattattttaacaattttatgaaatttaatggtataaaattttaaattttatgaagtttataatgatattgtttttgtaaaaaatgtcctctattatcagatcacccaattgcggactcctcttgcaactgcgtgggcgcataactgggtgagcagtggatgtgacgatgcactttccatacatctctgattataggggacattgttgtcctccacttcctgtcttcactcttccagcagacaaatcagcgacccagcactgacccagtagataaagccaacgccgtagagtctgtggctgggccttctaaaagtcttctggaatagacacccctcctggtattatatgagagggaaataagatatattttggtcatagatgggggaacactggccaaattgacatccttgggacgatgcccagcagaaagagacgtttctcaaattagcataaatttgcattataggctggtagtgaccctgtcctcaggacctcagacttaccttaattagtttgggccagtcatctggtctaatgccttgatctaattgtcttcaacaatatcccccattgcttcccaagtcctggtttccccttctgtaaaactccagactcactggatggttgaagcaggaaaggagatcatagatgaacagaaacttgcacataataaatctgcagagagccattgtgattattattggtcaaatatcaccatcgggacccaaaggaggcccttgctttgaccactcatggtcacctgggggcgtggtccaggcttaaactccacatgtctttctgaaattcacacagcagatgcaggagtctgcagggggcaggtcacagatatgaatggaaaagtttaggaaggaacagacaaggcagaggtcagaaggagtaggaaggagacagggtggctgatgagaaacgggaatgtaacaactgtcaggggtaaaaagcaagatgcagaacgtgaggaacacatgatccccttgcctcctttcttcctcattcagcacacatttatgtcaaaaaatctgtcaggttgtacctcaaacttttaatagtgatgactcttggagggtgagatttgggagaatgatgctgactttaaaattctactttatacttatagacttctagcttattttatgacaaacataaataattttaacatgaaagaaaaagataaaatttaaaaatttgaagtaaccttaccaggagcagtatttgagccctgctccttcgggtgggctgagaccttcaggtcatggcttttgctgaccgctggctgcccgtcatgctccacctggcaggtgagcttcacatcatccctgtgggcagatacattcaccaggagccagctcatccagttgtaggtaccatccttgttttctgtaagggttgaggccgtttctgtcctggacacgtttccattctccaaccaggtcagctgtagtctctgggggtagaacttcctcacctggcaggtgacattcacctggttctctgccctcacgggctgttgagtaacctccaaggtgggtggaactgaaacagcacagggcagaagctctgaccttgtggcacagacagatccagggagggctccataacgtagctcccccaccacggtgagggcatcaccaggacagtgctaggcatgcagcaggtgctcagacattgagggtgctctttgcatatgaatgaaattactaagcacaacgcccagcacacagtaggtgctcaaggactggtagctcctactaggctaagaatgagggaaatctataagcaccacccctggcatgcagttggaatgctgtaactgtagcaaaataaagaaaatcaccaagcacatagaggcttagctcatagtaggtactcattaactgtgtttgctatcagtgaaataaatgaaacggctagcacagtccttggcacctggtgggtggtgtggtcacccagccactgccattaaaatgttagtaagtggctggcacatctaggggcatgggaggtgggcagttaggaatttaggttccaggcatttcaagccctggagcaagagtagagctggatgagtggagggtggtggggggtgggcttggtggtcaggtgtgggcttgggctgggtgagggtcctctacctcggatggtctcagacaagttggcagtcccacgaagagggtccccctgcaaggtgacgtgggccacctcgcagatgacttgagagtgaacgtcctcgcgggtcagcaccaccttggctgtgctgtggatgctgtaggacacactgtctcctgcggggtccacgttggtctggaagtctgagagctcattcccatttttgaaccatttcagggtgatgtctctgggtgagaagccgtgggactcgcaggtgaagctcactgtgtgctgaggtgtggccctcgccgcagggcccgataccacgggggcagagggtttggctacaaaaggaccatcgataatcaggagacatgactcagatgacaatcactaacgataagtgtgtgagatgttaagaaccttctgagacattattttttatccttccaataatgtggaaagattaatgagggtggtgtccttattgtcattttacagagcaggatgcaaaggttgggagaggtgaggacccatgtgaggtgagacagtgtaggggcagggcccagagggaagtccaggcctgagttcaaagtcctctccacacagggagacttccaccaatctgggcataggaacaaaattactgattggtctccctccatgttattaactggtcctagctgtcctcccccggaaggctcactaacctcagagagggcatttatagaagccaatacagggatcaatggcaaagtggcaccaccgtgagagctgcaaccaggctgctcagcccaggacaggggtgggctgacacccccagctcctcatccgcaaaacaggaggacggaggacggcgtttctacttcctgggatgtcgccaggattcaatggggcaatggaagcagttttgctctggatcaaacacagaagatgcttccccgaaaaaacacagatctatctttaacccagactttacagatacacagaggtctctctttaggtattataaaaatatgaaacattccgtatttttcttttcacaaatatttcgttctgtcaaataaaaggcattaattaaggataaagctttaacgtagagccaagagtttgtaagagcattggaatcacacctgctagaggtcaagccacaggatgttgcagtagatagacctggataacaactgaagccagggtccgtgggattttgatctctttcacctggagtactttaatgaaataaccaatgagagtgggtttgcagttgaggattttcaaccagctaatgaactgtttccaaaaacaacctttagtgaaaatcccctataaaaaaccggtcctgtattgccatacgggacactattcagggtttcactgactcagtgtacccaaattgcacctctttatctttcagataaatgctatttcctttggccttcctaacaatcattttgctgttgttgttagttgttctaatctgctggaagtcctaaatttgaaaagaggaaatttttgggaatctgaatcttcagttaggacaggtttgggtgaaaaacaaggatcactgagtactaagaaagccaaaggtggttagctttttcatcgttaattaattacaagagacaaagacccaggccacaccaacagacagaaacctattctgggccttgaaagcaaacacattggagaatcagaacaacgagtgcagtttctccatgtagatgaattttaagggtgtctgcaaattgctaattgttaccttgaaccttctgccgtcctcttagaaagcacatattatacgtttgactttgccaatattaacttgctccctgatatgcgtgaaataatgtgagagcacagtaaggagggtgtcacttgaagatgtcaagtctttgagacaccagcagcatgggtgtccctagaaggctgagaggctgtcttcagttccgattttttgagggcttcttggcagcctgatgctggctgctctctctgtacctctcaacacttcaatcctccctctatttgtcagagggggtcctcatgtgagcccttgtgtagggcgagactctgagaggatccttggtggccaagggccaaaagtagatagaaaccccaccctgggaagatgagtgagggtaagtgcaagggcatagcctggcatgtagtaggtgcttaataaatagcccctgtgactgtaatcatgaggtttggtcattactgcttctggagctgcatagctattctttaggcaacagaacaaagaggcacacaaacaccaaggaaaggctcaaaccctactcaccgcagctgccagaaaaaacccaaatgataaaaggagcagcaaccaccatgtttggcgaactggctttcaagtaagatcacaggggaagctggaagcattttggaagaaggagggaaaagatacctcagtgacatctgggagtgctgagggagggaggcttctggggctgaggagtgaggatttgctgggactccagcacgtgtttagatacaaatgttttcaagacagaaggttccccagccctgaggctgcatctgagccaggctttgtcccagtctcctatcttgggccctgaggccagtagcatgggaggggtcctgttcaggcttctggggcctcccagaatgtttccagaatggctgttttgaagcacccatgacccaaaaagctgttctcaaagccccaaaacctggggcaccgcttttgctagggggctgtgtatgagaatcttctggagccattaagaactttagatatccaggcccaaattagatgcaattaaattggcattttaggggggttcctgggtccagctttgcaaactttttttttgatagttttcccaatgattctaatgagcagccaaggttgaaagccactggactccaacccaaaccccatttatacttggggcctacagaagccctgacctgtctgaggtcacacagcttcaccctaacacaactcacctttattgagcatttactgtgtgcttgttgatgccctaagcattttacacaatatcactccttcagactcggcccagtctgtgaggtcagtgttaccatcaaagggtgaggacatcgaggcctatggtggtgaagcaccttgtcccaggtcacagagccaggaagtggcagagccgggaagaggcccaggcagctgggatactgcctgtgttctcctaacgacagttctgcagaagctcagtaataacctgaatgacaccaccattaggggctctgtgcacatcctctccaatcctcacagaacccagaataggccatgataatcagcatctcaccgatggggaaaccgaggactcaagggaaggcaagactggcccaagatcacacgatcttgaaataacacctcactttgggggtgcctacagtgcgctaggtgatttacagagagaaccttacgcttacgactttcctaaaggagtccatgattgtctctattctacagatgaagatgccgtggctgaacaaaatgaaggcactgtctcccgattctccatgtgtcccagtgggcatttcctgtgtcccaccaagcacttatgtccattaacagagcaagtgttctaacttcttgagctccaacactgactgccacctcaattgtccctttgagattctagacttcatgcaatgttagggagaagcctccctcctgggtgcccaggcctggttaccctgcagccataagcaaaagacagtgggctcctgacagccggaggggagaatctcaactcttgctcacatgggccccaaacactctctaggaaatgcctcatctcctcatccttagtcctcagcaccatgaacgggcagatacgtgctctgctgggctgcaggaggctcgactctgctcattggacgctgctgagtgaagaggaaacaacacaacatgggggaagagtcctaaatgcctcatgtgtgttgagacctgtcctttaggaaccggcttggcatatcatgagacacgcgcagggcctttctgatgggagtgtgaagacaggccctcctacccctacagggttcttgttttgtttttaatgctttttgctgtagaactgaacaatgcaagagtttagaaagagaaggttggagcatttctccactcttgaaaaaccacagttgagtgtcacaaagacaaaggctgtgagtcaggctgcggggttccagccttggctccctgacctgctcccaagtcaggtctcctctctgagcttcagtgtcctcatctttaaaggaggtagcaaatggcttctccctcatagcactggttataaggagactctggcacagttgctgctctctggcccccttccccacctccctcctttctcatgtagctcatcatttaggccgagagcatggcaaagaggagtgagtacttcactaggagtgagcagatctgagtcacacctgagccaccactggctgtgactgcctgggctggggaggcaccacctgggcatttcagtgtctttgccaatattatctgcacaatcaggaaaaagccaccttccttgtctaagttcaagggttgtggggagctgatttcagtcattactgggcaatgtacattttcatatacatacatgtacatgaaagcatcatgttttacgctttacatatacacatttttttaaaaagctgttagtaaagctatgtgtcttctggagattccgttttttgcctttccaaattccagaggctgcccacattcctttctcacagttacatcttcccatcactctaacctcttgcttgcaccctcacaaatccttctctaagaattaatctccttcctccttcttgtaaggacctttcttatgtattgtgtccaccccgatgctagaggcagatgttaaaaccactgtattaaaaatgtttgaagtggggctgggcacggtggcttatgcctgtaatctgagcactctgggaggctaaagtgggtggatcacctgaggttgagagtttgagaccagcctgagcaacaaggagaaaccctgtctctacaaaatacaaaattagccaggcgtggtggcctatgcctgtaatctctgattgctacatcatctaggagggaaatcaggcaatattctcaaatatgaaaacacactatcctgtgacctaggaacgccacttccagtgggtgtctcccgcctgagtagggtgacacatgtacaaggtcatccattgcatgattgctttagtagctaaggttgggaataacttacatatccatcaacagaagactgtaaaataaattttgatatttccatagattggagtatttttcagctgtaaacacactggagcagctctctatgtcctgacgtggaatctcgatatggaatgacagggcttacatttgggagaagttttccaatcacaaacaagctttagtatctgaatgtgaggtgcattcttaacatttgggaaactgatgaaaagagaaatgctggctctctgacacctggctctgtttgaggagcttttatctagcacctatgatgcaccaggctcttctatggagacagcgtctaacgctggggaaggaaggagactgccacgattcagatatggactctggctccaattctgccactaactggccctgtgaccatggacaaggcccctgtcatgtcttggcttcagtctcccatctgtaaagggggttgggctggatggtctgaaggtccttcctgtgctgacattccataattcaggacttaggacgaagctcttgggcctctgggaggaaaccccagataagcattgttgcagccttatatgggaaacccctaagtcacccacttgtgggacctctttcctgaggtgagggacattctgagatgatgcagctctgctcggagcccatggtaactgtgtgactcagtccccaaatcgcagaagggtttcccaaatagacccacagcaaatgccaaacgtattggcatctcctcccaccaggccatcagattcaacagtgaatgtgcctcccagaaatcttgcccgtggggtgtttctgaggatgaaataaagaaaaacacaatttaccctcttcatgagctggacagatttctcctcattagaagggaagagaatgtaagcttggtggggaagagctttgggctgtttcattcactgctgtttgcacagcatctagggcagagcctggcacacagtggggtctcagtgagtgcctgctgcataaagaagagacttggccaccctgagggggaagcgttctctggaggcagaaggcaaggtccagccctgtgcctgggcaagtcactcaaattgtcagttccctcatctgtggaaccaaagggctggatcagctttggaaacacaagagctgtagagccgcaagctggggatgccttctgtcccatcatttccaagccgtggagcctcgagcgactgccatgacatctccaagcctcaactcatgtgatctggagaaggggtgacatcagttcatgaaagggtggctgctcagccaccaccacacctgactgttgctctaagaatggataatgtaattattgagttattgtcacacactaggggatgaaggaagcccacgctgtactcaccacgcacagacagctcggtgcctgctccagacttaaactccacgtggtcggggctccctttccggaacttcacacagtagtaggtgccggcatctgctggggtgatgttactgatgcggatggaaaagtccatgttgtttctctttgtgaggtctgaaacagttgttacccgtgggaagtggccttctttctgattgtagattaattcccggcctggtccagctcctctgaaccactggatgggccccacagggatcagggaagtcacagtgcagtgcagagtggccgactctccagctgcaactgatatggacttgtcaggctgaatcacctgcagctcttcctcgccagctacccctggaaaggagcacaaagcagtcattttttcatccttacgtgatcctctgtgtttcctcaagtgtttatcaatggctttcattgaccgggtgcacaccaggaaaaggccttgagctcagcacactacacgtattatctcatttaaccctcacaactggcctgtgacataagactgtaatacaagcgaggacactgaggcacagagaggttcaatttctgtttccttactttcttttgttctttctgtttgctttttttcttttcttttctttttgtttttctttttcttttttttaagacagggtcttgctctgtctgctgcccaggccggagtgcagtggtacaatcacagctcactctagcctcaacctcccaggctcaagtgatcctttctccttggcctcccaagtagctgggaccacaggtgcgttccaccatacctggccaatttttgtgttttttgtagacacacagtttcaccatgttgcccagactggtgtctacctcttgggctcaagcaatgcatctgccttggccttccaaactgctgggattacagacgtgagccaccatgcctggccaagaggttcaatttcaatgtagagctttgggttgaggacctgagtagaactcttgagccctccttggaagtgccatgttttgctaaatatgtgcctccactctgtggctacatggagtgttgcactttttgcatcaatggattgggtggggccgtgtgacttctttagacccttgagttacgagcagaagtgatgggtataatttgtgggctgtgcatgtaactgcaagagcctctgtggatcaatttctcccttcctgagacccacaaggctctaatggggcctgctccattgcctggatgcgtgaatgaccgttgcatgcagaactgccaatccacactgaatatgtagcttccagtagaaatacaacattgttttaagccccttgtaatatttcacccatagcataaacacattacataagtttcctaatgctgatgtgacaaattaccaaaacttagtgtcttaaaacaaatgtaacattttatagttctgggggttagaagtccaaaatagtgttactggggtacaatgaagaagaaatgaagaacgtcaaatacacaaagatagagaataaaacagtggtgactaggggtgaacttaggggaggtgatggggaggtcaaaaggtataaaattgcagtaagtctgacgaagaagtccagagattgaatgtgcaatctgaggattctagttaataatgttgtattgaattctgtatttttgcttaaaaagcacattttaggtgctgttgacatacaacacatgcagcataactatgggagatgatggatgtgtccatttgcttaactttaataatcatttcactacgtatatgtatatgtgtacgtatatgaaagcatcatgttttacaccttcaatttccacaatttttaaagagctttcagcagagctatgtgtcttctggaggctctgttttttgccttttcaaattctagagttttctcacattcctttctcacagttacatcttcccaccactctaacctcttgcatcttcacatgcaaacatcctggaatacagggatgtttcaacgtcattctccaagaattaatctccttcctccttcttataagcacacttgtgatgtattagctccaccctgatactagacccagatattaaaatcactgccttaaaaatgctgagaggtaaaggaaataacggaccaagaactaaaggaatataaatgtcttaacaaaatgagaatgtaaagaaagagaaattataggaagaaatcaaacagaaacttaggaattgaaagtacaataactaaaagttcactagaggggtcccccagtgggtataagcaggtggaagaataatcagaaaactggaagatggtataattgaaattattgagactgaggtattggtggaaaatagaataaagtatagagcacagaatctaagggaattgtgagacgttatcaaatgtatcaacatacaccttactggagttccagggggaaaaaagagaaagagagaaaggaatagaagattatttgaagacatagtggacaaaaaccttcacagactagataaaatacaggaatctacctattaagacacagaagaaatgcaagttgaactcaaaaataaactcagagacccacactaagacacattataacccaactgttgaaaactaaagtcaaagagagaatccttaaagcagcaagacagaagtgattccttacataaaagagaccctcaataagattttcagctcagctcttatacaaagcactgaaggccagaagatagagggatggtaagttcaaaatgttgaaagaggaaaaatatgtcaatcatgaattctatacctggcaaagtgtccttcaaatacaagggagaaattacgatattctcagataaacaaaagctaacagagttcatgaccattaaaccttgcctacaagaaatgctaaagggagtgcttcaggtggaaatgaaaggatgctacatggcaactcaaagttgtatgaagaaataaagatatccagttatgtgtacatgttttaaaaatcatgcttcaatatcccacaaacaagctgtgagcaccctgcccaggtgaccaggtaaccagtattttaaagctggtccctgccacaattcctcttcttgtcctcctctactgtgacctagtgacattgaaacaccctagtaaaacccatcatggtttttgcttgtgtcctccaccttgactcccagtaaaggcacttgcccagggatcccatctctcttgcctacccatctgcttgattgagcctgctccttgggagctcctcccacatggcttcctgcatggcctgccctacttccttctctaggaactgtgagtatgcctcttcatatgaacttttcatggccatgttagagtgatcctcaaaattcaaccagcaggaatcactctaacattttcaatagtaatggcaatgaggatgggatcattctaaactcaggtggaaagttcctagggaatgcctttgactcatgacttactgatttgctactctgattggctccacaatttgagaaggcttttcaccctgatgactttcttgtgctatgctatgtacagctttgtgttgccttttggagtgctgccatggctctccatcctgaagcgaggatcctgttccaatatcaataatgacatctgcctttcttcaagagcacaagatgatataacattggtaacacctcttcaaagaagattcatgtgatatgcatattaatgtcacataatccagcatcagtaagttttttctggggtgcttgtggcaacatattcttcatttacaaattttacttacaaattaaaatcaacaggccctcctgttagtgtctttaaatgaattaacaaataaaagtatctcttctctgtagagactttggctgtgtctttcatgcctcttggagtctctaaaccactcatgatggccagacattttccccagggcctttgatgcaaatataatgcccctctcagcttttgctatactccattacaacaagaaatttctggttatctattgggctctcctggcttagagtccagatctggggagcatactttcctgtcgtactctttaaccataaattgtcccaaagccagactctgcttatctgaaatggagcccactggaatctaaacttccatgaaaatacaaaactaagatcactgccaggtagagctgcacacctttctgttaacagttggcattattattactcggtttgttgatgcaataatcctcaaccaaacactagctgagttcagcagcatattagaaggaatatacacaatgagcaagtggtatttattcctggaacacaagaatgtttcaatatacaaatgacaaagaatgtaatacaccatatttatagaagaaagagaagaaacacatgattatctcatttgatgcaaaacagcatttgagaaatgtggacatctttttgtgaaaataccatcaataataggaatatatgaaaatttctataagataaaagttatatacacataccttattttattttcccttatcagtggctaatttatgattttatttacctatttatcatgtatattgattactgtcattattatgactttattgaaaaaagaaatcagtaaggtaatcgcatttacaattactaccaaaaaagctaaaatagctagaaacagatttactcaaggacatgaaagacctccacaaaaaaagctataacaccctgatgaaaaataaatagaacaaaaataatggaaagatatccatgcttgtggattagataattacttttgttaaaaatatacatactacccaaagagatctacagattcaattcattattagtaatatttcaatgacattttcctcagaaatggacaaaacaatcctcaagttcacattagtcatagaaaattgtgagtagaaaaggcaatcttgagcaaaaagactggaggcatcacattgcctgatttcaaacttgactaccgtgccatagtaatcaaaacagcatggcactggcataaaaatagacacatagacaaatggatcagaccagagagcccagatataaacgcacacatttacactcaattgacctttgacaaaaatgtcaagcagacacaattgggaaaggtcagtctcttcaaaaagtggcattgggaaacctggatatccatctgtagaggaataaaattagaccttcctctcacatgacacacaaaaatcaattcaaaatgtattaaagacttaagtgtaggatctaaaagtgtaaaagtactggaagaaaagtgccatgacattggtgtgggcaatgaattttcagatatgagtcccaaagcacaggcaacaaaagaaaaatagacaaacggcattacaacaaactaaaaagcttctacacagccaaggaaacaatcaacagagtgaaaagacaaccagcagaatggaagaagatatttgctagccatgcatctaatgaaaagtcaatatacaaaatatataaggaagtgaaacaactcaatattaagaaaacaacccaactaaaatatgggccaaagatcttaaaacccatttctcaaaagaagacattaaaatggccatcagacctataaaaatactcagccttactattcatctggtaaatgcaaattaaaaccacagtgagctatcatctcacacttgttagaatggctactataaaaaagatgataactagttttggagaggatgtggagaaaagggaattcttgcacatagttagtgggaatgtaaattagtagagccattagcaaaaacagtatggaggctcctcaaaaaattaaaaatagaactatcatatgatctggcaatctcactattgggcatacatccaaaggaaatgacataagcatgtcacagagatatctgtgctcccatgtccattgcagcattatttacaatagccaggatattaaattaacctagatgtccatcagcagataaatggagaaaggaaattggtatacacaatggaattctaatcagcctgaccaaagaaggaaatcctatcatttccaacaatataaatgatcctggaagatattatgctaagtaaaataagccaggcacagaaagacaatactgcataatgtctctcatatgtggaattttaaaaagttgaactcatagaagtagatagtagaatattggttaccaggcactaggcagggggtgcatttggagagatattggtcaaaggatacaaaatttcagtttagttaggagaaattagttccacaaatctattgtacaatatggggtctagagttcataacacaattcgtaacctcaaaaattgttgaaagcagattttgagagatctcaccacagaaatgatacatatacaaggtaggtcatatgttaattagctcaaattaggcattctgcaatgtacacatatttcattaatatggtatacatgataagtatatacagttctgtcaaataaaaataaaatattttgttaaaagtttcattgaaattagaaacttggagaaacaatgataaaaaatgaaatctcctgtgtgtgcatgtacacttacttatatgcatacatgcatatacatatgtatacacacatatgtatacacacatttgcaaatatatatacacacacatatatgtatatatacacacacacacatatatatgtatatatagacacacacatatacattcacaaatatatatcaaagtgtgacctattgtgatagtatataagtttgttttgtgtattaaataaaattacaacacacgttaaaatctcattaaaatatctggcccatagaaagtaaaatatgtggcccatagaaagcatccaacacattaataacaaatttagaagtacatacatcacagttgtaactctggttgttgctaacaagtgtggtaggcaataattaattctatgtttacttccctgcattttctaatatttctgctagtagcataacacgactaaaagaatgaactttggagccggtcgacctggacttgaatctcagctgctccactgactgaggtaggggacaatgaatggacaagttcctccctctgcctgagtctttgtttggaaataggggataatagttgcagctttcacacagggatgttgtgaggattagtggagctaaaacaggcaaaatgctaataactgtgtctacatggtaggaagagctcaattgttaaactcttactgctgtcatttgggtacagtgtatgtgtgagaaaaataatttgaaaagtgagacccctgccctctagggcctgtgaggtgacatcacagcagggcccagtggggaattgagaggctgctgtgcccagccctgtggttctggggtcagctccatggcctgagaagggatcaggacaggtaacttgtctgggagctgtgagcagggttctcccaggctgcaccaggaaaggccctccaatcctgcctgtcttgggaaggggaaagaaattatccatgggaaatttaagagaaccaaaggaggttgtagtacctgttatgggctgaatgtgtcccacaaaatgcatgtgttgaagctctaatccccagcacctctgaacgttacagtttgggagacagggtctttaagaagtaatttagttaaatgaggtcattggggtgggccttaatacaacaagactgatattctcataagaagaggagatgaggacacagacacacacagaggaagatcatgtgtttaagacacagagagaaaatggccctgtataagccaaggagagagacttcagtagaaactaaccctgctgacaccttgatcttggacttcagcctccttaactgcaaggaagtaaatatctgtagtttcagccacccagcctgcagttctttgttatggaagccctaggaaaggaatataggacccagtaagcagcaaatgtggaacttcttaaagaggaagaggccacagagaaatgggtggtaagaatcaggtcacaggggagggaggagcatgggggaacagaggacaaagtgaggagcacccttagggaggatggtggctgaacactcccaggatacaccacaccactgccctactcaagtgagcactattacagacttcacatcctcagtttggtgaagagagagggctgggcctagagccacataaccctgttagggtgtctctgagcttactctgtggacttgggcatgtcacttggccctagggcctcaggactggtgaggatttagataatgattcttctctgctttttcaattgaaatattatcaaaatgtaagtaattgttgttgtggtggttgaatcgtcctgtggttcaatgcctctggtagccagctgcagatccacagagaaagtgctcagctccctgattttctgctctcagtcaaagcctaatccttggcctttcttggcagcacttgtcattgtccggaatccctgaaagtccagggacaggccatggctcagtgggcaggaaaaaagattttaaccgaaggcagtgctcacctgtgagtctccccagcagtagcgtcatcagcaggaaaggactaggaaggtggggccaggaggctggcacgggcattctggagaccttaggagcctgctctgtccaaacgtctgtgctgggaagatcgcagactctgctctgaggagagaagacaagccctgcctcccttagttcaagaggaagtggctgcgatggagtgaagcagtaacctgcttctggattgtgaaacagaaatcaggaacagcaagcagctacaatgcaagcagttatgcatgccccatttcaggagaatcagacaggcttagcagaaataatgcttccttcccacctgaggtcttaactccttccatgactcctaaccccatctttatgtcttcttggtgatttgccatttggtgctcttaagccaggaaggacctgtggttatgaaatgtttcctaaactttccatctcaagacctcaggatgtggttggcttgtggtctcattctacaacagcctcaaccaagtgctactcagttggggcaggatgagggatcactggacctgctcagtgttggagaggaacaggtctgctcttgaaatggttccctattccgaacttttataaatataaatggcaaaacttagcccaaattcagtctcatgtggccgttagcactttcatatgcctgcacccagcagaaggaattatttcctgacttcttccaggagaggaagtgggcttagggtaataaggatctgctttgtgaggtgaggtggggattatgggttatggaaaggggatatgtttattatgggggagaatatggagggcagattcctggagcagtcacatcgatttcaatactctttgctctgcacatagaacacctattccattcatcactgtcttcagatgggaactgaggagggagggagaataaataccctaagaagatgtgctaaggagttggggaagttactgggcctgcctaggttcagttttgccttctaaccttgggataataagtctcactgccatgttttagtgaacatcaaaagagataatgactatacatccctgagattcagtaggttattattgatactcatggtgccaggtgaagagagggaactcaaatattgcttttaaatggatttctactgcatgctgagtttcccaccagtggccttctcccatgttccccggacttctggaacccagcttttatggtgtacttggtctacctctgacactctgagatcaatttctccctctggatcctcttcaccctgctttttgtcaatctgtagatgaattccttttcttacaatctccagctgtgtgactttcaacaagacacttgacttctctaagccttaacttaattacatgtaaatggaagttataacatgcaccttgtagtgatatggtaagagtaatataagccatacagaaggtttgattcatatttaattataaccaaaaaattgtggctataattacatttgtgtacagggtgagttcactgcttccctgacatacttgtgctttagaaaaatttccttggtaggagaaatggtttctcctccatcatctgtgactaagaaagacctgtctggaaacctctctttcccatgctgggcttgcaatccttcacctatcatgagtaattgtcaaatgaaattgtaaaagtcatcacatttccatgcaaatttctttttcaatgtggcagatgcacagagggtgaaatcatcacctcctgctccacactcacagaaatgaatataaaaatgataaaatcatgttaatcgatgccaaattacactttaaaacaagaaactagtctctatatgacatgaagggtagtagctgctgtgtttactgcagatgtcctgtgctccaggtactgtgccaagcattttgtcagttacctcattaattcatcactctggtcccatgaaattagcactaccattaacctttttttataggtgaggaaacttgaggcacgcaggcaataatacatttgttcaacatcacccagcttttagaactagaacacaggttgtcacactccatggccttcactatgacacctctcataagaagggagagatatctctcaggaaggaagcagagaagaagccataacgtcaattaggcgcagcctccacagcaaggttgggataggtgccatgttccataaagtgctgacagcccatgatcactcagggcattattcctgtaaagattacagtgaaagcagtaatcactaaagatttggggaaaagcgacatcataataaattcaaaaacaataactaaaaaacaaaaacagcaatgaaaataacatcttagaaaataatacctcagaaaataaaaatataaaatgtgaaaatatttttaacattaacatatttagtaaccttatagagataatgaaaagaaagtaaatccataaaacaaagtcacgtgtgaaacaagaataggtaggtgtgcagtaacaacaggtatctgagaaaagtaataaaaagaagaattttgaaaaaatataattagtgctaaattgtttaaaaaacaaataggtggatgtattaatctgttctttctataattgttataatgaaatacctgagactgagactgggtaattgataaagagaagaggtttaattggctgatggtttcagaggctttacaggaagcataatgctggtatcagcttctgggaggtcacaggaaacttacaaaaatggcaaaaggtgaaggggaagtgagcatatttacacgaccagagcaggagggagagagagagtagggaggtgccacacattttaaaaccaccagatctcatgagaactcactcatcatcatgagaacagcaccaagagggaaatctgacccaaagacccagccaacttccaccaggtcctacctccaacactgggggttacaattcaacatgagattttggtggtggcacagatctaaaccttatcattttctcctgcccactttcaaatattatgtccttatcacattgcaaatacaatcataccttcccagaagtcccccaaagtcttaactcatttcagtattaagtcaaaagtccaaagtcttatctgagacaaggcaagtgccttccacctataagcctgtaaaattaaaaataagtcagttacttccaagatacaatggggtataggcattggctttagccatctgaatgggaatactcccatttcaaaagagatacattgcccaaaagaaagggaatacaggcctatgcaatgcaatctgaaacccagcagggcagccattaaagctccaaaattatctcctttgactccatgtctcacatccagggcacactggtggaaggggtgcactcccaaaacctgagcagctccacctctgtgcctttgcaaaattcaaattccacggttcttctcatacttggtgttgaatgcctgcagcttttccccgcacatggtgcaagctgctagtggatctatcaatctttggtctggaggaaggtggccctcttctcacagctccactaggcaatgccccagtgggaattgtgtgggggctccaaccccacatttcccttctgcactgccctagtagaggttcttcatgagggctccggcttctgcctggacatctagacttttccatatatcctctgacatctaggcagaggctcccaatcctcagctcttgtactctgcatacctgcagaattcacaccacatggagccaccagggcttatggctggcaccctctgaagcagcagccgagatatactcgagccccttcgagccaagaccggagctggagtgaatgcggtgcagtgggccgtgtccgaaggccgcacacggcagcaggccctggttctggctctcaaaaccattcttccctcttagacctctgtgcctgtaaagagatggtctctgaaatgcctttgaaggcttttcccagtgttttcaatattagcatttggcttctttttactcatgcaaagttcacagcctgcttgaattcgttgcctgaaaatgggcctttcttttctaccacatgtccaggctgcaaattttccaagcttttatgctctgcttcccttttaaatataagttccagtttcaagtcatctctgtgcttacgcatatgaattaggctgttagaagcagcgaggtaactgcttcttcttttttgtgtgtgatataaagtcttactctgtcacccaggctggagtgcagtggtgcaatcttggcttactgcaacctccatctcccgggttcaagtgagtctcctgcctcagcctgctaaatagctgggactacaggtgtgtgccatgcaccaccacacctggctaattttttttttttttttgtatttttagtagtgatggggtttcaccatattggccagactggtctcaaactcctaacctcgtgatctgcccgcctcggcctcccaaagtgctgggattacagacgtgagccactgtgccccgcctcaggaaatttcttgaatgctttgctgcttagaaatttcttccagcagatactctaaattgtcactcccaagttcaatgtttcacagaaccccagggcaggggcacagtgcctccaagctctttgccaagacttaacaaaaccgatctttgctccagttgccaggaagttcatcatttccatctgagacctcctcagcctggacttcatggtccatattactctcagcattttggtcacaattcaagaaatctctgggaaattcccagctttcgctcatcttcctgtcttctaagccctctacactcattcaacctctgctcattatccagttccaaagccacttccacatttgcaggtaactttatagcaatgccccactcgtcagtatcaattttttgtattagttcattctcacacagctaaaagaaatacctgagactgggtaatttataaagaaaagaggtttaattggctcctggttccacaggctgtataggaagcatgatgcttgcatacacctggcttctgggaggcctcaggaaacttacagtaagggtggaaggcaaagtggatggagacttatctcacatggctggagcatgagggatagagagggtggaggtgttacacacttttaaacaaccagatttcaccagaactcagtcactattacaagaacagcaccaagagggaaacctgcccccacgattcaatcacttcctagcagtccccatctccaacactggggattacaatttgacatgagattttggtggggaaacagatccaaaccgtatcaattgagtagctgactgtacataagtgagtagtaagttagtgagctggctcttcatgcagggacaatctcctagaacccagcaccaagagacacacccaaacaaattaatgacaataggtataaatatagcaatggtaaaagctgtaacacaaaatagtttgaaaatgttgcaatagaaatactatcttaagaagcatagtttaaggtaaaaagcacaaatggttgaaagagaaatgtttccttttatgaaagtaacaactaacctgaaagatgagtcacaaaatattatgcctccaaaaattatgatttgaaatatatgactcaaatattgatagaataatttccatgctctggcagaatctctacttaaagcagcaagatgacttcctgtgaactccaatccttcaatgaagatctattagatgcatagatacaatttgagtgaaaaattttgtggaaatcatgtggagaattgagtttcaaatttaggttgactttgtgcagtacagatacagcctggatgtctgagaaaaccaggagcctggggaaccatgagctaaaattctctttctgccaagtttagccctgcactcatgacagaaggtgcagataatgagataaggctgtgggacaagtgaggagtcagtggatgtttgaggagagcaaagattaagtttgtgggcttaggaatcagaacttctagatttgaatttagttctatcagttctagctgtgtgacccaggggagtctgtttaacatctctgtttcttgagttctctcaaatataaaatggaagtaatcgtatcaacttcagaggtttgttatggtcataaaatggattaatatatgtaaattccttaataattgctgattgtgctccaaaagttagatgttattgttattaggtggtgttttggcaatagtaatacctttaaaaaacagactctctgtcctcgaggatttacgatgcagtgcgacaaccctggccaatggctgggggatgtgcagataccaccacatgatgagtgtgggtcacgtgtctagccctataatcacgaagtcattactagcacctgggtcatggtacaagcatgacctcgggaaatcactgtgactaaagaaaggcaaatcccggtaagagtctgcacagatgctcacggaaagtgtactccaaatcttgtctcctgctgggatgggagagaagaaaatgttcccaaatggaaatccatagatacgggtgagatgggctgagagggtgaggagacttacatataaatacacctgtgtagaacaggctgctctcacctgtgagtcccaatagcataaagaggcaagggttgtccaggtgggctggaagacaggtatggtcattgcctgctctgttgaaagtttatcacggagagaccccagcctctgagctctgcagggaaggagaagccccacctgccatgatatctgaggagggaatttgctgtggaaggaaaaggccacgagactggcatggtctcatagtaaaagaggaagcaggcagagttgccacccctgggaagttgctgatatccaccttggggttcccacgcctgggagccttggacagtagtggagacagtttgactgctctgggcctgctctctgtcccaggggcactcacttcatgccagggttcccttggcccttcctcagttgacagccctgatccacagggccctgtagctaaggactgagtttggattttcagagactgtaattctgggtgtggaaagtttgaggtcttgttactgtagcagcctttaaggatggaaccaaaactcctggatgtcccctgcaaaaagtccctagggccaacatcaagtaacaagctgagcaaataagaaatggcaactcttctcaggtctgtcagagaaatgaggtcacagagcagaccattgtctccaaaactggaagttagacaaaatgatatagagaattacaacttcctgaagccaaaacctccatgggaaccagtgccagggtaggaaaacctgcactgtaattgaagaattgctagaggcttggtgtgggccagtctgaggaacagattccagcaggacccaatcgcagggaactccaacactgttgtgagatttacctccaggagcttgattaggtgctcagagtgaatatgagagaaacattcacttgtgcttcctggggggtgtggaggggaaagcgaatcattctgaactacaccagagcattctttcttcttaccaagcccagctctcaggagaaactattttaccagtgcctaatctgctgggctttgatcagagcctaacctacctggggaaggcaagcacccaactccagccccctctggccatcctgtcccaccataggggaaaaaactgagaggcacttgtgaagtccacaggccaggggcacaggctcacataagactgcaacctcatgtaactggtgatgagcccatgtgacatttttgggaaacaaataattgaaagagagattggacaaccacagtgaaaatgcagtgaataaatgagcagtgaaaatgctggagataaagttcaaattgtatgtcagtggagttatagaagcatgaatagctggtgaggcaacgtagaccctggtagtgtttgaaaaacttcagataggcagcccgcaggacttagagaaggtgaatttaacagatacgggatggggtactgacaaatagggcgaaggtgtccctgaggatgtgacaacagcaaaaatcttcacgtgaaaggaacttttgcagagatttcacgacactgaaagtgcaaatgataaggtgctggaaacaaatccaaacttagagaggaaggtgataaaacacccagatagaaaggatgtttgctccatatccgaagtgtacaagaaggaggtaagcactcttccaactactcttgaaacatttttacaaagaaataaaatactgaaacacttgatgtttccaatgttttgaattacagggtactaataaatattcatttattattttttattgccttctacatttgtaactgacactatgagagtttcctatattttgacaaaaaattgtaaaggtcacaatatgatcattgtttttctgattggatgtggagattgctttcctgggtttccggctgcacagtcattcttgcaatcttgcactgctgtgaaaagcgagggctgcctgtattcgttataatgcttatggtaataaatgctaaataaaaattaatcaagataagagaaattagaatgccagggtagacaggagaattgatattatgtacagggtggtttgccaaaggtgcctttaataaagtgacattgagcagaggcttgaaggagggatgaagggagccatgcagctgtgttggggaagaagcagaggagtgatacaatttgacttttccaaaaatccctgtagctgaaaaatgaaagccaacagaggctacagaagtgttcccggaagagatgatgctggccgggacagggaggggtgatggaggtgagaagtgtgcaggttagggatgtaactcagtgctctcctgcagcaggcttggactggcccctgaaagccaaccgttaagtttcaggaattttgcaatccagttgttaaacttctggtagcttgaaactggccatgttgggggtgattataccacagaaattgtcaagtacaacaaatcagctttttttttcctttaagagagtccatttttaaacacttaccatctcacgagtggacataagtattttgaaggcagaattgaatatggggtgtaaagagacatcagggaggattcgggagtcaaggaggcttttggactgcggcagcatttccgccatgagcagcagggcggggaagcctgcaggatgctagaactagtgttcccatcacagagagagcagggagagcttctttgtttctgagtgtgaggagtaggacccttagacaaagaggaaggataatctttttattttcttaaaaccactttgggagtgcatttgtattcaagaggcaatagagaacctcaacaaggctggggagttgggataggcaggaatctggaaggcaggataactcttgagaacctggagagcgtctgtggtttacggtcagtctcaaggcgatggatgggagtcctggtgtgtttagatttggcatgtttctcgccttctagggaggtgccgttaagtcagtgcccagagcccaatcccatggcacctgctcaggaccatgaatgaagaccttgctctggggcatccaggtctgtgtgaaggagcaacaggagcctgtgggcaggcagatgtcttgggaggggagatgtttggagccaagtctagagaagcttctcactggctcattctctcaagctgagcctctcaggaaaggaaggaggcagcagagatgagggtcccacgtggcaggggaggaaggaaggagctgtaggaaaacacatccacacttagtcatctgctcatctttcaagacatgtttcctgagagtctgttatgttctcggggctggtctcctgggatacctgtcactggtggacaggcagtcctgatagaactctgcctgctcagccatcctgccaagtcctgatgccctttccaatattccttccactcagacacacagagggtcagagcacaaacagccttcagggcttcccatttgggtttctcaacattagtttacaatgtggatttctctgaccccatggagtcccagcattcaaataatctacagatagcctgcaagggaccacccactcatcactgcctccatgaaactcctagggcactgtggacatctttgaacacatttcaagcatcccacattgtacaccacccacataatttctgtgggttgggagccttttaaagggttccccaagacttccgagggtgcggagggagcttaactccacggaccctggtgctgcatggcatgtgggctgggccttcctgttggccttgcccttctgagacagcccttggtctgtcctcccttccttgtacttacagtcaggtcttctgcttccaggggacgtagatggggcccaggaggacagctatgaggagcagcgcagtaagggatgatgccgggcctggaaatcagggaagacgaggggctatgagagagaccacttgggaggccattgtaggggcctccacttaccccatctgaggctgcctgggcccatctatgccccacctttgaacctgcatcctgcccaggctatcttcactccagcacaaggcagaagccacagaaagaggctccccattctcactcatcctgtcccaggttgccagcttattctcctggagggaagaggtggagggggtgtgtactcaggtattcatacatgtggcaacggggttcctcacttgaccctcacaagcctatgggagcagggattgtcattccattctgctagggaaactgaggcccatggattttagggagggtcacaaggttacttgcattcaaacctaaagaagctcatcactagtgttccttaggttgatccctgagaccatgtcctttggaacaaaacaagtccaaattcctagggacattttaatgactataaaagggtaggcaggtggcttgaggatggcttcacaatgagagttgcaggttccctgcttagccccagaagtaaggggaggactccgtgttctcagaacttggaggagccatggaacactggacataatgaaaccttccggctagaaaacatcctggtgagtcacggaaatgggtctcatgcttgggagggcctcagatgtcacctaggccacctccaccccagtgcaggtgtcatctgaaatctttctgttagttgggcacactcagttacggggaagcacatgtttggacgctgcatttttaacatgagcagttcaggcttttaaaatcaacatttttaacgcgagcagtttgggccattaaagatattacagtatattttaaataaataaaatggtgctggtgggtccttaaggaagaaatggagaactcagcatctgtggctgctggggtgttggaggccggcagttctcagctgggtggctctctgggacttcttctcccttgaggaaagctgcactgcccaattccaagttcactcctccttctaggggacagcccacaagaaagattggctgaattgaaaataggaaggccacgcttctctcctcaattaaaaaacactacatgacgctctcagcccttgggatcctccgcaggagcagctgggtctttgttctacctgcactgtagctcagcacctcgctcctcctacagtcctgcctccccatttcctgaggcatgctgaccctacagctcttcaggatgcttcctgcattcctgtatccatctctagtctgccttacagagaaactgaccttggtaagttgtctgtaaagcttactctaaaatataaatttgaagcctgaatactcatcagctcgcaatgaggacctcagggctggcagtgagtggggctgggcaccatggctgggatgcaattgataaaactttcactggcagtaagctgggatggcgtaaccacaggcaggaaattccttggcatcaggcttttgaaacaaattgggaaatggtagttataaggactaacttgttccatggctatcactgggcatattttttttggggaaatatgctgagaagctacgagtgattgattatgagttaaggttcagcgtgaaagcaagaggacttcttggcagcactgcactttcttatctcttgtggctagagggcagaaagaatagagggttgggccctggacatcattaaaagagtagcagaatcacagaggaggatgaatctcagcttcaacggttgctatgctggggtagggccctgatggggaagttgtgggaccctgagatgtgggagtggacatttgggtcaaagcactcaaagatcttcggttgacttaagagttgctgggtacaattgcagcagcatagctacttatctgtataaaatatcctccccaaatcaaataaaaaatgaaaacaaagtaagttctgcacaaccctggctctcagtattacttgaagagagaaagccaaactgcaaaatgaccgtgagtcaaaacagaacactcacctaaccctagtgcacagtctcttacccggctcccacgccactggtgcagcacttatgtaaccacaaggcatcttgcattttacctgccagcctagacaacttaaaatgcatttccagccttagtacctgagcaaagatgctacatctggcaaaccgaaagcacccaaaaatgccagccctggtcctggtccaagccagtgggtggatgaataactgaaaagcaaatgcaatccagtcttgatggtgcagttttacctccctgagaagtaaaactatgaaccctagaaacatcacaaggatcaggaataggagaaattccaaggtgggagaggaagaagggagactgactaggggcctcaggactgagggacagccctgcagccaggcacctgggacccatcccccaacaccagccccagccataaacggaggcaaaggaatgacatagaaaagagcaaaagcctcaagtcaattaaatcaccacttcaagaaactagaaaaagtagagcaaaataaactcaaagcaagcaggagacaggaattaataaaaagaagagtgcaaaaaatgaataaactggaaacacaaaaacaatttaaaaactcacggaaacaaagtggtcctttgaaaagaccaataaaatggaaaaaaactatagcaaggctgatgaagaagaaaacagaaatggcatattttagatatgaggttgaaacaggggatatcgccataacccttcagacaccaaaaagataataaggagatattatgaacaactctacacacaaaaatatgacaacttagataaaatggacacaaaattcttcaaaaggcacgagttaccggaactcacccaatatgaaatgaataatatgagtaaccctaaactactgaggaaattgaatttatacttttaaaacacccccaaaaattcttgaggcccaagtgtttcaaagaaaaatactgcaaagcatttaaatatgaattaaaaccaaatttagtgcacagaaagatagtcataaaagaaatttgaggaaaatttgaatgtatactccattttagatgatataagggaattgttttaataattttatgaaatttagtgattaaaaatttgaaattgtattaactgtaataatgatactggttttgttatgctgtctttagtcataagatcacccaactatggattccatttggaactgcgtgtacatgcatgactgagttagctgtggacatgatcacacgccttccatacatctctgattatagaagatattttttgccctccatttcctatatttactcttccagcagacagggacatggaaaaatccgtgacctagcactgacccagcagataagactaaccaccataaggtatgtgggaggaacctgggcctttgaaaagtctcctggagttgagactcctcctggtattacacaagagggaagtaagacatattttggtcatacggagtggaacacaggccaacttcaggtccatgggacaatgcccagcagaagaggactgtttctctaactagcacaaatttgcattttaggctgatactgaccttgtcctcagggacccagatttactttaattagtttgaaccaataacccgatctaaaggcaagaggtcttcaacaacatcccccatgacttcccaagtcctagtttccccttctttaaaactccagacttactgggtggttgaagcaaaaacagagatcatggatgaatggaaatttgcacttagtaaatttgcagaggggtttgtgattattgttgctcaaatatcacaatcaggacacagaagaggtccgttctgtgaccattcatggtcacctgcaggcctggtacagtttttttttttttttttgacagagtctcgctctgtcgcccaggctggagtgcagtggcatgatctcggctcactgcaagctccgcctcctgggttcacaccattctcctgcctcagcctcccgagtagctgggactacaggcgcccgccaccacgcccggctcatttttttgtatttttagtagagatggggtttcaccgtgttaaccaggatggtctcgatctcctgacctcgtgatccgcccgcctcggcctcccaaagtgctgggattacaggcgtgagccgccaggcctggtacagttttaaactacatttgtctttctgaaacatacacagcagatgtcagggtgtactgggatgaggtcataaatgaggatggaaaagtttggatgaaacagaaacaaagcagaggttagaaaaagtagggagcacaagggtgggctgatgagaaacgggcacaacaactctcaaggaataagggaaggcaaaggactctatgagaagatggttccccctgcctgcctctttgctccttaaatatatatttatgtacgccaggcgcggtggctcacgcctgtaatcccagcactttgggaggctgaggcgggcggatcacgaggtcaggagatcgagaccatcctggctaacacggtgaaaccccatctctactaaaaatacaaaaaattagtcgggcgtggtggcgggcgcctgtagtcccagctactcgggaggctgagacaggagaatggcgtgaacccgggaggcggagcttgcggtgagcagagatcgcgccactgcactccagtctgggcgacagagccagactccgtctcaaaaaaaaaaaaaattaaacatatatttatgtcaaaagttctattaacttgtgcatcaaattcttactagtcatgactcttcgcatgtgggatttggggggatggagctgacattaaaattttactttgtatttatagacttctagcttattttacagcaagtgtggatattacttttaaaatgagagaaaaagacaaaatttaaaaattttgagtaacctcaccaggggtagcatctgagctctggtccttctggtggactgtgacctctagggcaaggcgtttgctgaccgccagctgcccatcatgcttcacctggcaggtgaggaccacatcatccctttggtcagatatgttcaccaggaaccagcttgtccagttgtaggtaccatccttgttctctgtaagggtcgaggctgtttctctctggcacacgtttccattctccgaccaggtcagctgtaggctctgggggtagaacttcctcacctggcaggtgacgtttacctggttccccaccctcatgggctgttgagtaacctccaaggtgggtggaactgaaacagcacagggtagaagctctgatcttctggcacagacagatcacagggagggctccataacttaactcccactaccacggtgagggcatcaccaggacagtgctaggcaggcagcagatgctaagacattgagggcgctctttgcatatgaatgaaattaccaagcacagtgcctggtgcacagtaggtgctcaaggactggtagctcctactaggctaagaatgagtgaaatctacaagcacaacccctggcatgcagttggaatgtaagaactgtagcaaaatcagtgaaatcgccgagcacatagggacttggctcatagtaggtactcactaatagtagttgttcttggtgagataaatgaaactctctagcgcagagcttggcacgtgattgctggtcccctgaccgctgccaataaaatgatagtaagtgaccagcacacctaggtgcatggcgggcgggcagtatagtcagggattagattacaggccattcaacctctggagcaacagcctggggagaggggagtgggcttgacagccaggtgtgggcttgggctgggtgtgagggtcctctacctcggatggcctcagacaagttggcagtcccacgaagagggtccccctgcaaggtgacatgggccacctcgcagatgacctgagagcgaacgtcccaggggtccagtaccaccctggctgtgctgcggatgctgtaggccacactctgtcctgtggggtccacgttggtctggaagtctgagagctcattcccatttttgaaccatttcagggtgatgtctctgggagagaagccatgggactcacaggtgaaactcactgtatgctcaggtgtggtcctcgccgcagggcccaataccacgggggcagagggtttggctacaaaaggggcatcgataaacaggagacatgactgagatgacaatcactaacgatgagtgtgtgacactgttaagaaccttcagatacattaattttaatccttctaataatgtggagaggatggtgttcttattctcattttacagagcaggatgcaaaggttggaagaggtgacgaccagccccaggtcagacagtgtagggaaaggtcccagagggaagtccaggtctgagttcaaagtcctcctctccacatagggtgacttccaccaatctgggcacaggaacaaagttactgattgttctccctctgtgtattaactggtgctagcctgtttccccaggagagctcaccaacctcagagagggtgtttacagaagccaaagtagggaacaatggcaaagtggcgccaccatgagacctgcaaccaggctgctcagcccatgagaggggtggcctggaacatgcagcccctcatctgcaaagtgggacagcagcattttcccttcccaggggtgcaacaaggattaaatggggccatggaagaagttttgctttggatcaaagtcagaagatgcttcataaaaataaacacagatctgtctttaatccagacttgacatatacctagagctctctctctttgtgtatttatgaatttattccatatttttcattcttttcacaaatattccagtacagtttttgaaagaaaatgaagtagttaaggctaaagctttaacatggagtcaagcgtttgtaagagcattgcactcacacctgctaaaggtcaagccacaggatgttgctgtagacctggataacaatggactgaagtcaaggtacatgggattttgatttctctcatcctggagtgtcctaattaagtaaccaattcatacgagtttgcagtttagcatttctgccaggcaatgaactgttttcaaaaacaacattttgtgaaagtccccagtacaaaacttttcctgcattgccctatgggacactgttcaggactaccatgactcagggttcccaaattgcaactctttatttcccagataaatgctatttcctttggccttcctatcaatcattattttttttagttagcaggtctaatctgtgccaagtcccaaatttgaaaagagggaaggtttcttggaatctaggtcttcagttgggccaggttgggtccaaaaacaatgatcactgagtactaagaaagccaaaggtgggtgatttcttcatcgttaattcattacaagagacaaagatctaggccaccccaacaggcagaaatctatcctgggtcctgaaagcacacaaactggagaatcagaaaaatgagggtagtttctccctgtagatgagtcctaaacgtgtctccaaattgctaattattaccctgcacctcctatagcagtcatcaggaaacacatattaggcatacttgcatttgtaaatattaacttgctccctaccacatgcaaacattttatgggcacagtaagaagggtgtcacttgaagaagtcaagtcatcaagacaccagcagcattgggcatccctagagggctgagaggctgtaaccagttgccatttattgagggcttcttgggagcctgatgctggctgctccctctgtacctctcagctctttaatcctccctttattgccttgagggggtcctcgtgtgagtcccttataggaccagggtctgaggggaccccagctagcaaagggccaaaagtggataaaaaacccaccctggtaaggtgagggaggatgaaggcaagcacggagcctggtatgcagcaggtgcttaataaatgagccctatggctgttatcaagaggtttggtcattactacttctgaatctacacacttattctttaggcagcagaacatagaggagtagaaacaccaagaaaaggctcaaatcctgctccctgcagctcatgaaaaactcaaatgataataaaagcaaaaccaccaagtctggacaactggctttcaaaaaaaaataagatcataggtaaagctggaagcattttggaaggaggagggaacagagtcctctgtgacatctttttattattattattttactttaagttctgggatacaagtgcagaatatgcaggtttgttttataggttatgtttgccatggtggtttgctgcacttatcaacccatcatctagattttaagccctgcatgcattagctatttgtcctaatgctctccttcccctcacccccccaccccttgactggccctggtgtgtgttgttcccctccctgcgtccatgtgttcacattgtgcaactcccacttatgagtgagaacatgtggtgtttgcttttctgtccctgtgttagtttgctgaggataatggcttccagcttcatccatggccccgcaaaggacatgaactcattcttttttatggctgcatagtattccatggtgtatatgtaccaccttttctttgtccagtctatcactgatgggcatttgggttggtttcatgtctttgctattgtaaatagtgctgcaataaacatacatgtgcatgtgtcctcatagtagaatgatttatattcctttggttacatacccagtaatgggattgctgggtcaaatggtatctctggttcttgatccttaaggagtcaccacactgtcttccacaatcgttgaactaatttacattcccaccaagaatgtaaaaacgctcctatttttccacagcatcaccagcatctattgtttcctaactttttaataatcaccattctgactggcatgagatggtatctcattgtggttttgattttcatttctctaatgatcagtgatgttgagctttttttcatatgtttgttggccacataaatgtcttcttttgagaagtgtgtgttcatatactttgcatactttttgatggggttgtttgtttttttcttgtgaatttgtttaagttccttgtagattctggatattagacctttgtcagatgggtaaattgcaaaaattttctcccattctgtaggttgcctgttcactctcatgatagtttctattcctgtgcagaatctctttagtttaattagataccatttgtcaactttcacttttgttgcaattgcttttggcattttcgtcatgaagtctttgcccatgcctatgcctgaatggtattgcctaggttttcttctagggtttttatggttttgggttttacatttaagtctttaacccatcttcagttaatttttgtataaggtgtaaggaaggggtctggtttcagttttctgcatatggctaaccagttttcccagtcccatttattaaatagggaatcctttccccattgcttgtttttctcaggtttgttgaagatcagatggttgtaaatgtacagcattatttctgaggtctccgttctgttccattggtctatatgtctgtcttggtacaagtaccatgctgttttggttactgtagccttgtaatatagtttgaagtcaggtagcgtgatgcctccaattttgttctttttgcttaggattgtcttggctatacgggcttttttttggttcaatataaaatttaatgtagttttttttctaattctgtgaagaatgtcaatggtaatttgatgggaatagcactgaatctataaattactttttcatgacattcatccttcctatccatgagcatggaatgtttttccatttttttgtgtcctctcttatttctttgaagcagtggtttgtagttctccttgaagaggtccttcaaatcccttgtaagttgtattcctaggcattttattctctttgtaccaattgtgaatgggagttcattcatgatttggctctctgcttgtctattgttggtgtataggaatgcttgtgatttttgcacattgattttctatcctgagactttgctgaagtttcttatcagcttaaggagtttttgagctgagatgatggggctttctaaatatagaatcatgtcatctgcaaacaaagacaatttgacttcctctcttcttatttgaataccccttatttccttctcttgcctgattgctctggacagaacttctaatactatgttgaatagaaatggttagagagggcgtccttgtcttgtgctggttttcaaggggaatgtttccagcttttgcacattcattatgatactggctgtggggttgtcataaatagttctttttattttgagatatgttccgttaatacctaatttattgagaatttttagcatgaagcggtgttgaattgtattgaaggccttttctgcatctattgagataatcatgtggcttttgtcattggttctgtttatgtgatggattacatttcttgatttgcgtatgttgaacaagccttgcatgccagggatgaagccaatttgattgtggtggataaactttttgatgtgctgcgggattcagtttgccagtattttattgaggattttcactttgatgtttatcagggatactggcctgatgttttctttttttgttctgtctctgccaggctttggcatcaggatgatgctggcttcataaaatgagtcagggaggtgtcccactttttctagtatttggaatagtttcagaaggaatggttccagctcctcgttgtacctctggtagaatttggctgtgaatccatctggtcctgggctttttttggttggtaggctattaattactgcctcaatttcagaacttgttattggtctattcaggggctcgatttctttttggtttagtcttgggagggtgtatgtgtacaggaatttatccatttcttctagattttctagtttatttgcgtagaagtgttcatagtattttctgatgttagtttgtgtttccatggggtcagtggtgatatcccctttatcttttttttattgatttgattcttctctcctttcttctttattagtctagctagtggtctattttgttaatttcttcaaaaaaccagcttctggattcattgattttttgaagggttttttgtgtctttatctccttcagttcgtttctgatcttagtcatttcttgtcttctgctagcttttgctcttgcttctctagatcttttaattgtgatgttacggtgttgatttcagatctttctagctttctgatgtgggcatttcgtgctataaatttccctctaaacactgctttagctgtgtcccagagattctggtatgttgtctctttgttcttattggtttcaaataacttcttaatttctgtcttaatttcattatttacccaggagtcattcaggagcaggctgttcaatttccatgtagttgtgtggttttgagtgagtttcttaattctgagttctaatttgattgaactgtggtctgataaactgttggctatgatttccgttcttttgcatttgctgaggagtgttttacttccaattatgtggttgattttagaataagtgccttgtggcactgagaacaatgtgttttctgttgatttggggtggagagttctgtagatgtctattaggtccacttgatccagagctgagttcaagccctgaatatccttattaattttctgtctcattgatctgtctaatattgacaatggggtattaaagtctcccactattattgtgtgggagtctaagtctttttgtaggtctctaagaacttggtttatgaatctgggtgctcctatatttaggatagttagttgaattgatccctttaccattaggtaatgcccttctttgtcttttttgatctttgttggtttaaagtttgttttgtcagggaccaggatcgcaacccccaccttcttttgctttccatttgcttggtaaattttcctccatccgtttgttttgagcctatgtgtgtctttgcatgtgagatgggtctcctaaatacagcccaccgatggggcttgactctttatccaatttgcctgtctatgtcttttaatcgggggatttaacctaattacatttaagcttaatattgttatgtgtgaatttgatcctgtcttcatgatgctatctgattattttgcacaccagttgatgcggtttcttcatagtgatcactgatctttatattttggtatgtttttgcagtggctggtaccggtttttcctttccacatttagtacttctttcaggagctcttgcaaagcaggcctggtggtgacaaatccctcagcatttgcttgtttggaaaggattgtatttctccttcacatatgaagcttagtttggctagatatgaaattctgggttgaaaattcttttgtttaagaatgttgaatattggcccccactctctcctggcttgtagggtttctgctaatagttgttctgttagtctgatggacttccctttgtaggtgaccttgcctttctctttggctgcccttaacattttttccttcattttgaccttggagagtctgattattatgtgtcttggggttgatcttcttgtggagtatcttagtggtgttttctatatttcctgaatttcaatgttatcctgtcttgctaggttggggaagttctcctggataatatcctgaagtgtgttttccaatttggttccatcctccccatctctttcaggtactccaatcaatcatagctgtgatctttttacatagtcccatatttctctgaggttttgttcattccttttcattctttttttaaaatcttgtccgcatgtcttatttcagcaaaatggtcttcaaactctgatatcctttcttctgtttggttgattccactactgatacttgtgtatgcttcacaaagttcttgtgctacgttttttagctccatcaggtcatttatgttcctctataaactggtttttctggttaccagctcctgtaaccttttattaagattcttagcttctttgcgttgggttagaacttgctcccgtagctcagcggactttgttattactcaccttctgaagcctacttccgtcaattcgtccatttcctcctttgtccagttttgcacccctgctggagactcattgcgatcatttggaggagaagaggcaactctggccttttgggttgtcagtgttttctgttgattttttctcatcttcatgaatatgtctagttttgatctttcaggctgctgacccttggatggggtttttgtggggactttttttgttgatgctgttgttgccttctgtttgtttttctttcaatggtcaggtcccttccctgcaaggctgctgcagtttgttgggggttcacttcgggccttttcatctggttggctcccacacctggacatgtcacttgaagaggctggagaacggcaaagatgggtgcctgctccttcctttaggatctctaacctcgaggggcactgatctaatgccagtaggagcactcctgtgtagggtgtccgacaacccctattagagggtctctctcagttgggtggcacggggagcaggacccatttaacgaagcactttgactgtcccttggtggagtgagtgtgcttcagtggggaaaaacccacttatctgggctgcccagatttctcagaactagcagcaggaaaaactaagtctgccagactaagacagtggccacccctccccctaggggctcaggcccagggagatcagagttctgtccctgagccccaggctggagttgttggagttcctggagggatgccctgcccagtgaggagggatgggtcagtcctgaagaggcactctggccgcagtttgccacagctggtgtgttgggctgtgggggatacctcttgggaacaagccatctagcctccctggctccagcaggggaaaagcatggcctgcagttatagagatggctgccacctttcctttgccctgggaacttagtgtgttaggcagcgatcagtcccaatgctggctgccgcctatctcccaaggagctcagatggcttaaacagcaggcagccacagctgtgatcctggccaccccttcccctgggagctcagcagccttaaggagattctagctgaatggctgttgagaatctgtgcagctctgcggttgattgagaccctaggccccagtggcatgggctcatgagtgggatctcccgatctgagggttgcacagttctgtggaaaagcactgtttcacaggctaggtagcagctcactcaccgcctcccttggctggggggtgggggcttccctgccccacagctctcagggggcctctgcaccacactgctcttcctctccatgggtctcgccagctgcctagtcaattctgatgtcagaacctggatacttcagttggtgttgcaggatttgctcgcttttttggttcttttccatgggagcctcctatcactgctgcttctagtcagccatcttggccctgtcctgcgtgacatcttggtgttttgaggcagggagacttttggggctgaggagtactgggatttcaatgcttttttagatacacacgttttcacgatggaaggtcctccagcactgaggctggatctgagcagggctttatccggaaactctatcttgggtcctgaggcccgtactgtgggaggggtcctggccagggcactgaggcctcctgagctgtttccaccacattttttctgaagcacccacccccagaaaagctgttctcaaagccccaaccctatggggcatgacctttgccaggggactgggtatgagaatcttctggagtcatgaagagttcagatgcccaggcccatgtcagatcaattaaattggcatttttaggcggatcctgggtccaggtttgtaaacatttttgtcaaagtttcccaggtgattctaatgggtggccaagattgaaagccacgagactccaccccaaaccctatgtatccttgaggcctggaggagcactggcccacctgagatgtcatggcttcggcatcacatagttcacatttatggaacatttactgcattccaggtgctgctctgagcatgttacacgatttaactccttcagctctccctacagtctgtgatgtcggtgttatcatcaacagatgaggacaccaaggcccacagtggtggttgccttgtcccaggtcacagagctagaaaatggcagagctgggaagtggcccaggcagttgagttcttgcccatgctctcctaaccactgttctgccgaagctcagtgataaaccaaacacctccaccattagaggctctgtgcacatcctctccgatcctcacagaacctagagtaggggccatgattatcagcatcacacagatggagaaactgaggactcaagggaaggcaagactggcttaagattacacaaccttgaaatagcacctcaatttggggatgcttagaatgtgctaggtgatttacagagagaacctcaaatcattttctttctcttaaaggagttcatgatgatcaccattctacagaagaggaaactgaggctgggagaaatgaaggcactgtctccttgtcctccatgtgtcccagtgggcaccttctgtgtcccaccaagcattcatgtccattaacagagcaagtgccctgaattcttgagccccaacactgactgcacacccaattgtcccttcgagattcttgacttcatgcaattcaagggagaagcctccctcctgggtgcccaggcccagatacactgtggccagaaacaaaacactgtaggctcctgtcagcctgaggggagcatggaaacttgctcctatgggccccacgcaccccgtaggaaatacctcatctcctcatccttagtcctcagcaccaagaagaggtgggcatgtgctccgctgagctgcaggaggcccagctctgctccatagatgctgctgagtgaaggagaaacagcacaacatggggggagagtcctaaacgcttcatgtgtgctgagacctgtcttttagaaacaggcttgacatatagtgaaccatctgcagaacctttctaatgagagggtaaagccagcccctcctacccctacaggactttttttcatttgttttgttttgttttgtttttgatggagttttgctcttgttgcccaggctggagtgcaatggtgcaatctcggctcaccgcaacctccgccttccagtttcaaacgattctcctgcctcagcctcccgagtagctgggattacaggcatgcgccaccatgcctggctacttttttatttttagtaaaggcggggtttctccatgttggttaggctggtcttgaactcctgacctcaggtgatccacccacctcggcctcccaaagtgctgggattacaggcatgagccactgcacccagcctcagtttcgtctttaatgcttttcgctatagaactgaacaatgccagagtccggaaagagaaggttggagcatttctctacacttgaaaaaccacatctgagtgagtgttgcagagacaggggctgtaagtcaggctggtggggaggaaatcttggctccctgacctgctcaccactcagatctcctctctgagcctcagtgtcctcatctttaaagaggcaacaaatggctccgccctcatagcactggttataagcagactttggcacaactgccactccctggcccccttccctgcctccctcctttctcatccaggtcatcatttaggctgagagcatggcaaagaggggtgagcaccatactaggagttagcatatctgagtcacacctgagctactttctggctgtgactgcctgggctggggaggcaccatctggaaacttcggtgtctttgcctatattatctgatcagggtaaatccacttccacatctatgttcaagggtggtggggagccctgttgctatgtcatctaggagggaaattagataatattctcatatatgaaaatacacacaccctctgacttagcaatgtcacttccagtgggtgtctcccacctgaggagggtgatacatgtacaaggccatccactgcaggattgttagtagctcaagtttgggaacaacttacatacccatcaacagaatgctgtgaaataaattttgatatttccataaattggagtgttctgcagctgctaaagagtggagcagttctatgtcctgacgtggaatctcgatacggaatgttagggcttatgtttggaagaagttttccaatcaccaatgggctttagtgtctgaatgtgaggtgcattctgaacctttgggaaatggatgaaaaaagaaatcctggctccctgatccatggttctgtttgaggagcttttatttagtacctgtgatgcaccaggttcttctatgaagacagtgtctaacaaacactggggaaggaaggagcctgcctctattcggaccttgactctggctttgattccatcaataactggccatgtgactgtggacaaggcccctatcatctcttggcttaagtcccccatctgtaaaggggagttgggctgaaagtctgaaggtctttcccgtgctgaaattccaggattcaggaggtaggatgaggattctgggcctctggctggaaaccccaaataagttttattgctgctttaaattgggcacccctgagccacccatacgtatgacctcttttctgaggtgaaggatattctgagatgacccagctctgctcagagcccacagtgactgtatgactcagtccttaaatcacccaaggcttcaaatagacccacagcaaatgcgagacttattggcatctcctcccaccgggccattagactaaacagtgaatctgtgcctcccaggaatcttccctgtgtgatgtttctgaagattaaataaagaaaaacacgatttacactttccatcccctggatgaatttctcctcattagaatggaagagaatgtaagcttggtgtggggaagagctattggctgtttcattcactgctgtttgcacagcatccagggcggagtctggcacacagtgggttctcagtgagtgcctgttgcaaacttaaagtataataaaataaaataaataaaaaaaaataaaaaaaagaatatacttggccagcctgagagagaagcgctctttggaggcagaaggtgagttctggccccgtacctgggcaagtcactcaatctgtcagtttcctcatttgtggaaccaaagggctgggccagattgggaaggacaagagctgtagagccagacagattgaagatgtagtctctcccatcatttactagcaatcatttaccttgagcaatagcatgatgtccctgggcttcaactcacctgatctgtagaagggggtgacaacaggtcttgaaaatgagcactgaaaatcacacctgattgttgctcaaagaatggaaggtgttactattgagttattgtcacacatcaggggatgagggaggtccatgttgtactcaccacccaaagccatctcagtgcctggtccagacttaaactccacgttctcagggctcccttttcgaaacttcacacagtagtatgtgccgacatctgctggggtgatgctactgatgcggatggaaaagtccatgttgtttctctttgtgaggtctgaaactgttgttaccctggggaagtggccttctttttgattgtagattaattcccggcctggtccaactcctctgaaccacaggacgggtcccacgggaagcagggaggtcacagtgcagtgcagagtggctgtctttccaactgtgaccaacaggagcttctcaggctgaatcatctgtagctcctcctcacctgccacttctgaaaaggagcacaaagcaatcattttttcatccttacataatcctgtatttcctcatgtttatcaaagatattcagtgactgggtgcacatcaggaatcaggagcaggacttgatctcagcacactgcatgtattatctcatttaaccctcacaacatgcctataacataagactgtattacaattgagggcactgaggcctgaggcacagagaggttctttttttttttttttttttttttttgagagagggtcctgttctgttgcccaggctggagtgctgaggcataatcatggctcacggcaacttcaacctctcaggttcaagtgatcctcctacctcagcctccagagtagctagaaccacatgtgtataccaccatgccaggttaagctttgtatttttgcagaaacaggtcacaccattctgctcaggttgcccttacttgagtgcaagtgatccacttgcctcggctttccatagtgctgggatgacaggtgagaaccatcaagcccagccaagggattcaatttcaaggtagagttttgggttgaggacctgaatagaactcctgaactctactttgaagtgtgtatatatatatatatatatatatgtcatataagtgtcatatatatttttatatattttatatatatatatgtatttaaaaactgtcagtaaagctatgcgtcttttgcaggctagtttttgcctttccaaattctagaggctgcccacattcctttctcactgttacatcttcctatcactctaatgtcttgcttgcatccttacatgtccttctcaaagaattaatctcctttctccttcttataaggacccttctgatatgttgggtgcactctgacactagacccagtattaaaaccactgtcttaaaaatgctcaaggaagtaaaggaaaaaatggacaaagtactaaaacagcagggatataaacacattcacaaaacaagaacatccagaatgagaaattataaaaagaaatccaacagaaacttagaagttgaaaatacaacaattgaaagttcagtagaggggttccccaacaggtgtgaacaggtggaagaaaaatcataaagctgcaagatggaataattaaaattattaagactgagatacggatggaaaatggagtatagtatagagaacagaatctaagggaattctgggacactatcaagtggattgaaatacacattattagagttccggggaaaaaaaagaggaagagaaaaaagagcagaagattattggaagaaatcatggtcaaaaccttcacaaacttaataaaatacatgaatgcacaaatttaaagacactgaagaaatgcaagtttaactcaaggatagaatctgagacccacactaaggtacattataattcaactgtcaaaaactaaattcaaagaatcctgaaagcagtgggagagaaacgattcctcacatacaagagaccctcagtaagattatcagctgagctctttatataaagtattggaggtcagaagacagagggatgatatgttcaaaatgctgaaagaggaaaaacctgtcaaccatgaattctatacctggcgaaagtgtccttcaaacacaagggagaaattaagacattctcagataaacaaaagctaagatagttcatgaccacaaaggcttgcttacaggaaatgctaaagggagtgcttcaggtggaaatgaaatgatgccatatggcaactcaaagttatatgaagaaataaagatgtccagttatatgtaaattttttttaaaaaatcatatttacctgatacctccacatcccacaaacaagttgtgagcaccctgccaaaccaggtacaccactgtgataaagctggtccctgccataattcctcttcttgtcctcctcttctgtgacttagtgacactgaaacgttctagtaaaacccatcatgctttttcttggtgtcctccaccctgactcccattaaaggcaatggcttctcatctctcatctctcttgcttccccatctgcttggttgagcctactccctgggagctcctcccatatggcttcctgtgtggcatgccctacccagctatgcctctccagatgaaattctcatgaccaggttagagtgatcctttaagacacaacctgcaggacttactctaccattttcaacactaatggcaatgaggaggggattattctaaaccggggtagcaaattcctaggagatgcactttgactgttcatggcttacggatttgctactgattggctccacaatttgagaaggttttttttttgccctgatgcctttcttgtgttgtgctatgcacagctatgtgttgccttttggagtgctgccaagactctctatcctaaaatgtgtatcctattccaatatcaataatgacagctgcctttcttcaagagcacaggatgttatagcaacctcttcaaagaagactcatgtgatacttataataatatcacataatccagcatctctgagttgttttgaggtgccagtggcaatgtattctacatttacaaattttacttgcaaattaaaatcaacaggcactccttttagtgctttcaaacaaacaaaaatacctcttctctctagagactttggcaatgattttcattcctcttggaatttctagaccactcctgatggtcataaacttccccagggcttctaacgcaaaacaaaaaataaaacaaaacaaaaaagcccctctctgccttgttctttacttcattctaacaaaaaatgactggttatctactagaatctactggcttgtggtccagatctagggggaatatttcctgttgcaagcattaaccactggttgtctcacaggccagtccctgctcatctgaaatgggtcccactggaacttaaacttctactgaaacacaaaattaaaatttgtcaggtgcagctgcacacctttctgttgacagtggccttattactactggatttgttgatgcaacaatcctcaaccaaatactagctaactgaattgaacagcatgtaagaaggattataaaccatgaacaagtggtatttattcctggaatatgagtatgtttcaatatacaaatgacagacaaacaatatggtattctacaaatatttatttatagaataaatagaaaaaacacatgatcatctattttgatgcagaaaagcatctggtaaatttgtacatctatttacgatgaaaacaataaaaaggatatatgaatactttcacaagatgataacattcacctactcatactttatttttattgcacttatcattgtcaaaaattaattttttcattcacctatttatcatgtgtattgattactgtctttctctgcagtggatgtaagcaacaaaagggcaattactttttctcttttattctaccaaagtaccccatgtttttatgtcagatcctggcacatagtaggtatccaatagatatgtgtgtaatgtttgaattgctcagtgggacatttccctcgaagactgaaatcttctattttaggtggtttgctcctgtggaatttgacagaaaatgagtttcccatgtagaggacttagtgaaaaaaaatcagtttgcaaacatacagaaagtagaagagcccagagaagaaaaccacaatctcccttcacaccacattgcccactccacacccaagagcagcagctgcagaaatctcatggaatagaatcaagaccggaagtgtttgagtaatggtgaaacctgtgacctctagagtcagagtgcctgagttcaaatcgtagctctaccagttaccaatgagtgagcctggagcactttgtgcttctgttttcttatctgttaggaaaggtgacaagaatatctaccttgtatataatgatcacatgaagtaaaagaggtaaggcattttcaacagtgtctgccacatggtgaacgttcaaaaattgtaaagttattgctcagtagatttctgaggcttggaggcttcagtggacattagatgacaaggataaggataagggtatggatatggatataaatataactatagttataggtaatataggcagacctgtgtcacctgtatccccacatttttttcctcatttctaccttcatggaagagggaatttcaggataaaaatgcacagaaattctgctttgagggaaaatgcattttaccaagagagaagtttgcttatctgttgcttctattaacagattggaggactttcagtggtaagattagagaagtaggaaggagggagagtggctgggcaatagggaaaaccacacatctcttcaatgtgcatttcatatagactgaaaaaatgagttgaagtttacagtaaagaaagtctttaaaattctgtgtgtgtttcagcatggtcacatgagatttatctcaggaatgcaaggatggtataacattcataaatctccaaatgtgatatgctacatcaaggcaatcttgagcaaaaagaacaaagatggggccgggcatggtggctcatgcctgtaatcccagcactttgggaggccgaagcgagcagatcacgaggttaggcaatcgagaccgtcttggccaacatggtaaaaccttgtctctactgaaaatacaaaaaattagccaggcatggtggtgcacacctgtagtcccagctacttgggaggctgaggcaggggaatcacttgaacccgggaggtggagattgcagtgagctgagatcacaccactgcactccagactggcgacagagcaagactgcatctaaaaaaaaaaaaaaaaagaacaaagatggaagcaccacactgcctaatttcaacattgactacagtgtcaaagtaatcaaaatggcatggcactggcataaaaagagatatatagaccaatggatcagagcagagagcccagcaataaactcacacattcacactcaattgactattgacaaaagtgtgaagaaaacacaatggtgaaaggtctgtctcttcaaaaagtggtgctgggaaagttggatatccatgtgtaggggaatgaaattaggccttcttctcatgcctcatacaaaaatcaactcaaaatggattaaagatttaaatgtaagatctgaaactgtacaagaactagaagaaaagtttcatgacattggtcttggcaatacatttttggatttgagccccaaagcacaggcaacaaaagcaaaaatagacaaaaggcattaacaacaaactaaaaaagcttctacccagccaaggaaacaatcaacagagtgaagagacaacctatagaatggaagaaaacatttgcaaaccatacatctgataaggagtcagtatacaaaatatataaggaagtcaaacaactcaaccataagaaaacaaccctattaaaatatgggccaaagatccgaatagacatttctcagaagaagacattaagatggcaagtcagcgtataaaaaaaaatccaaccttactattcatgagataaatgcaaattaaaaccgcagtgggctatcatctcacacctttaagaatggctattatcaaaaagaggaaatttagtattggagaagatgtggagaaaagggaacccttgcagacagttggtgggaatataaattagtagagccattagtgaaaacagtatgcaggttcctcaagaaattaaaaatataactcttatctgatctggtaatctcactactggcatatatccaaaggaaatgacatcagcatgtcacacatatatctgcactcccatgtccattgcagcattatttacaaaagccaagatatggaatcaacctaggtgtctatcagcagataaatggagaaagaaaatgtagcatatatgcacaatgaaattctaatcagccttacaaaaagggaaaccctgtcatttgcaacaacatggatgaacctggaggacattctgctaagtgaaataagccaggcacggaaagacaaacactgtatgatttcacgtatgaagaatctaaaaagttgagctcatagaagtagaaagtagaatggtgtttatcgggggctagagagggggtgtagttggggagatattagtcaaaggatacaaaatttcaatttaaataagagaaataagttcaagatatctattgtacaatgtggtgtttatacttaataatatgaattgtattcttgaaaactgctgagagagcagagtttacgagttctcacaataaaaaatgataaatatgtaaggtaatgcatatgtttattagttcaaattagtcattccacaatgtatgcatatttcttaatatgttgtacataagtatacatacttttgtcaaataaaaataaaataaaatatttattttgttaaaaatttcactgaaaatagaaagagaaccaatgattaaaaatgaaatctcatctgtgcatgtacatgtacatgcataggcacatgtgcatatatatgtgtatataatgtgtatatatacacattcacaaatatatataaaagtttggcttatcatgttagtatataaggttgttttgtgcattaattacaattatgacaaatttaaaaatctcagtaaaatatttggcacatagaaaccatccaacacatttttaacattttgggaaaacatacatacactagtgttttacctctgattgtttctgactggtgtgatgggtgattattaatctaatgtttgcttgcctgcattttctaatatttctacacatagcataacatggttaaaagggtgataaactctggaactggtcaacctggacttgatcccaactgctccatggactgaagtaggggacaatgaacaggttcctgcctctgcctcactccccatttgcaaatagagcacaagagttatagcttccacacagggatgctgtgaggattagttgacttaatacacacaaaatgctaagaagtgcatctgccttacaggaagagagcaattgctgaactattactgctgtcatttgggtacagtgtatgtgtaaaaaaaataatttgaaaagtgagaccttgccctctaagacctgtgagatgacatcacagcagggcccagtgggcaactgagaggctattgtgcccagccctgtgaccgggggtcagctgcatggtctgaaaaaggggtgaagacaggcagcctgtctgggagctgtgaacagggctctctcaggtggcaccaggaaagacctcccaatcctgtctgcctgggggaagggaaaataaattctccagaggaaagtcaagatgaccaagggagatggtggtgcctgttatgggctgaatgtgcccccaaaacgaatgggttgaagccccaatccccagcgccttagaatttgaccatatttggagacaaggtctttaacccatttatgcccgaggttgcaatttttttttaatttgaaaaatcagaccttggcgatgcccttgagcagtaggatataaataactcccgcaagcttagtgatccaataacggagcactaggcataaatgggtgaagcaatttagttaaatgaggtcactggcggggagccttaatccaatatggctgatgttctcataagagaaaatgagaatacagacacacacagaggaagaccatgtgtcaagacacatggaggagatggccttctacaagccaaggagaaagacctcagtagaaactaaccctgctggcatcttgattttgcaattcagcctccagaactgaaagaaagaaagtaaatgtctattgttttagttactgagtctgtggtgctttgttgtggaagccctaagaaaggaatataggacgctgtaagcatgaaatgtggaacttcttaaagaggaggagggcacacaaaaatgggtaggaggactcaagacaggtaaggatttaataatgattcttctgtgtttgtcaaataaaatattataaaaatgtaactaattgtgatggtggcagaagcctcacaaggtttgatgcctctggtagccagctgcagatccacagagaaagtgctcagctccctgatcttctgctcttggacaatgtccagtccttgaccttccttggcagtgcttgtgcttatctgaaattgctgcaagtccaggggcaaggctaggtccaggaagcagggagaaagggttctagcccaatgcaatgctcacctgtaagtcccagcagtagagtcagaagcaggaaaggaccaggaggatggggccaggaggctgggacaggcattttggagacctcagaagcctgctctgttcaaacgtctgttctggggagatgtcaggccctgctctgaagacagaagacaagccctgcctccctcaattcaagaggaagtggctatgatggaatgcaacagtaacctgcttctagattgtgacttacaaatcaggcacagtaggcagctacaaagcaaggagttaatcgtgctccattttcaggataatcagacagggttagcagaaataatgcttcctgcctgcctgggacctgtgctccctcctcgtgtccccaaacccattttcaggtcttcttggtgatttgccatttgaggcttttaagtcaagaaagatctgttgttaggtattgttttctaaagtctttatttcaagaccctaggatgtggttggcttgtggtcttgttctgcaccagcctcaaccaaatgccactccgctggacgtaggagaagagttcacaggacctgctcaacactggagaggaaccagatcttctcctgaaatgattttctattccaaattgctataattggcaacacttagcccaaattcagtctcttgtggaccttagcactttcatgtgcctgcacccagcagaaggaattatttcttgactccttccaggagagaaactgggtttgaggtaataagcaactgctttgtggagtgaggtggggattgtgggttatggaaaggggatagggttatcatgagggaagattatggtgggcaggttcctggggccgtcgcatcaatttcaataccctttcttctacacacagagcacctatttcattcatcactgagttcggatgggaaatgaggaaagaggaaaaatccatgctcctgccaagagtgtgtgccaaggagttggggaagtcgctgggccctcctatgctcagtttcaatctcctaaactgggaatagtaagtctttttgtgcagtgttttagtgacgattaaagaggtaatgagcatatcatgcctgaaacccagtaggtcattattgatactcacggtgccaggtgaagtgcgggaactcaaatgttgcttttgaatggatccctcctgcatgctgagttgcccaccagtggctttctcccagcaacccaggcctcctgagacccagcttatatagtgtatttggactctcgctgccaccctgaaatcagtttctccctctggattctctaaatcccgctccttgttcaaccatagattaattcctcctcttacaatttccagctgtgtgattttcaaaaagacactacttctctgagccttggtttgattgtatgtaaataaatgttagaatatgcaccttgtagagctatggtaggaataatataagccatactgaatgcttgactcataattaattataagcaaaaaaacatggctataattattttctgtgtacaggaagagtccactggttctctgccaccgttgtgccttagaaaagccaccttgttaaaagaaatgatttctcttccagcatctatgactaagaaagacctgtccagaatccttcatctcacatgtgggttttaggttcttaatctgtcatgaataattgtcaaatcaaattgtaaatgttatcatgttttaattgaaagtcctgttttaatgtggcagatgtacacagggtgaaatcttcccctccttctccacacccacagtagtgaaaacacaaaatgaaaagaatatatgaatcaatgtctaattacacttgaatacaagcaattggcttctatatgacatgaaggaattataacagctatcatttattgagagtttcctgtgctccagatatggtgccaagcatttttctattggtaatgtcattaaatcattgctctgaccccatgaggtaagctcaaccattaacctcctttcacaggtgagaaaacccgaggcacatggagagtaatgaatttgctcaagatcacccggcttttagaactggaacataggctgccacactccacagccttcacttttaatggttgtactatgatacctcttgcaggaagggagagacatccctcaggaagaaagcagagaagaagctatagcctcaattaggagcagccctcatagtgaggctggggcaggtgccatgctccacgaggccctgacaacccatgatcacatggggaattattcctgggaagacggaagtgcaagcaagaatcaccaaagatttgaggaacagcactgcagctaacaaattcaagaaaaacaataactcaaaaacaaatagcaatcaaaagaacttcacacctgagcaaatatgaaaaaacaaaatgtgtaaagttctttaaagttagtatacttaatgatcttataaggaaaacaaaagagaagtaaattcataaaccaacatcaggcatgtaataatatgaaacagaaataggcgggcatgaggtaacaacaaccatcttgaaaaaataccaaaacacagactttggaaatgaaaacataatcagtgctgaaattttttaaaaaaacttaataggttgactagctgactatacataaataagtataatagtaagttagtaagctgggtgattatgtaggggaaatttcctgtggtacagcacagagacacacccaaacaaagtaatgtggataggtaaaaatataccacaatattgtggtatatcttttcctattgctctatttttacctatccacattactacattactttgagaggtgtgagtcataaagtattatgtctccaaaaataagaattgggcgtatatgactcaaaaatgcatagtatagtgtcaggaagatggcagaatctgtgcttagagcagcaagtgccttcctgtgaacttcaatccttcagtaaagatcaactaagtacacagatgcttacaatttttgtggaaatcacgtggagaattgaaatttaaatttaggtgacttggggaagcatagataaaatctgaatgtttgagaggaccaggaacctgggagtccatgagccaaaattctcctttatctgccatatttcaccctgactcatcacagcaggtgcagataaccagggacgactttgggacacatgagaaactgggagccagtggatgctccagaagactaaagatgtaagactgtgggcttaagaatcaaaacttcctggtctgaaatccagctctaatgggtcccagctgtgtgatcctggggtcactattaacttccctgtttcctgagtttccccaagtgtacaacggagagaataatcataccatcttcataagtttgtgatgagaattaaatgaactaatatatgcaaattacttaatactatctgaccatgtcctccaaaagttatatattcagtattaccattatcattatagatagtagttagatattatcgttattaggtagtgttttggtaatagcaacaattttaaaaaacagatcctctgccctcaagaatttatgatgctgtgtgacaaccttggccagtggctggtggaggtggagtacgacgatgatgagctgaggtcatgtgcccagccctagaatcatggagtcattaccagcaccaggggcatgctataggcatgacgtctgggggaatcaatatgaccccagtaagggtctactcaaatgctcatggaaaagctgttccaaatcttgtctcatgctgggatgggagagaagaaaatgctcccaaatgtaaatcaataggagcaggtaacatgggctgagagggtgaggagacaccatgtagaaatacactcatgtagagcaggctgcactcactcacctgtgagtcctggtagcagaggaagtggcaggggctgtccagatgggctgggagacagggatggacattgcctgccctgtcagactgtctcatggagagaatccagactctactctgcaggaaaggagggcatctgcttatctgctatgttgtctgaggagtgaggtagctgtagggagaaagggccatgagactgggacaatcctccattgtgaaagaggaagtggacacagttgccatctctgggaagttgtggatgtctgtgcttggggttcccaggcctgggtagatttagccagtactggagagaggtccactgccccagaacctgctctctgtttcagaggcactcatctcatgccaggggtcccatgacccttcctcattgacagcccagaccaagagggctctgtagctaaggactgagcttgcaatttcagagaccataattccagatgtggcacatttgagggcttgtggctgtagcagctttctgggatgaaacccagtcccctgcacaacccctgcaaaaagtcccttaagtcaacaccaaggaaccagctgagcaaatcaaaagtgacatttcttcttagatctgtcagaaaaacgaggtcacagggcaaaccactgtccccagaattgaggagttgggcagggtaatatagagaatcacaacttcctgaagccaaaacctctgtgggaaccagtgccggggaaggaaagcctgcactgtaattgaagaatttcttgaggctcagtgtgggccagtcttagacacaaactcgaggaggacccaataacggaggtctcccacacttttgtgagttttatctctgggagcttggttagctcgtcagagtgaatataggagaaatattcacttgtgctcccaggacacggaaaggaaaagcaatcacttaaaaatataccagagtgtcctattgttctttcgcttgttccatatagtaaatatgcaagacaaaggcaagcactgttccaactactgttgatacatttttagaaagaaataaaacaatttaactctcaatgtttctaatgctttgaattacagtatactaaatatttgaacttcctgctacatttctaactgacaatatgacagtttctaatactttgacaacaattatgaggatcacagaacaaccattatttttcccattgaatgtagagttgtttaccagggcttcatggtttccagttatttttacaatcctgcactgccatgcaaagtgaggacatgcaaaataagtacacgtggtaatataatacagtgctgaggagaaaaactgatcaggataagaggaattgaaattctagggtaggagaggaaaatgactatttttcctcaccatggtttacaaaatgtgtctttaataaagtgaaatttcagcagaaacttacttgaaggaaagaagagagtgagccatgcagctgttttggggaagactcagaggaatgacaggatttgacttttcaaaaaaaaaaaaatcatggcccggcgcggtagctcacgcctgtaatcccagcacgttgggaggccaaagcgggcggatcacgaggtcaggagatcgagaccatcctggctaccacagtgaaaccccgtctctactaaaaatacaaaaaattagccgggcgtggtggtgggcgcctgtagtcccagctactcgggaggctgaggcaggagaatggcgtgaacctgggaggcagagcttgcagtcagccgagatcgtgccactgcactccagtctgcagcctgggcaacagagcgagactccatctcaaaaaataaaaaaaaatcatcgtgactgaaaactgcaatccagtagagacaatagcaacagtttggaagagatgatactgattgggaccaggaaggagcgatggaggtgagaagcacgcaggttataaatataactcagtggtgtactggagcaggcttgggctggttcaagacagccaactgtcaaactttaaggaattttgcaatctggttgttaaactgttggaagcttgaaactggctacattgggagtatttacactatcaaaattgacaagcgctataaatcggccttctttttccttttgaagagtcaactgttatacgtttatcatctcatcagtggacataagcactttgaaggcataattgaatgttgcgtgtaaatgaaaaagaaatcaaagaggactccaaagcttttgaactgtcgcggcattcctgccatgagcaacagggttaggaaagttgcagattgtcagaaacaactagtgtttccatcccagagagaggagggagaactgctttctttttaggtgtgaggagtaggacactgtcttagtccacgtgtgttgctataaagaaatacctgaggctgggtaatttataaataagaggtttatttggcttgtggttctgcagactgtacaagagcatggtgtcagcatctgcttctgatgaggccctcggactgcttctactcatggtgagagacaaagaggagctggcatcacatggtgagagaggaaggaagagagagagagaagagggaggtgctaggctctttgtaacaatcaaaccttgtgaatactaattgagcaagaactcagttattactgcagacggcaccaagtcattcatgatgtatctgcccccatgactcaaacacctcccatcaggccctacctctaacataggggatcaaatttcaacatgggatttagagagaacaaatattcaaactatcttggatgcttaaacaaagaggaaagagaactgtttttttcccttaaaactgggatgggggttcatttgtattcaagaggcaatagagaacctcaacaaggctggggagatggagtaggcgggaatccagaagacagaataagtacggaaaagctggagagagtctgtggtttatggcctgtctcaaagtgatggatgcaaggaatcctagtgtattcagatttgatgtgtttctcacattctagggggatgctgtgagtcagtgcccagagccccattccttggcccctgctcaggaccatgtgtgaagactccactctggggcatcaaggtggcagagactgagggttccacatggcaggggaggaaggaaggagctgtgggaaaacacgtccaggtttaatcatctgctcatccttcaggaaatgtttccggagagcctgttatgttcccggtgctgatctcctcctgagatgtctgtggtggttggacaggcagctctgagataggactgtgccagctcagccctcctcctgagtcctggcgccctttcccgcatcccttccacgcaggcactcagaggatcagagtgggaacagctttcagagttgcctatctggggcttctcagcattactctacagtgggattccttagaatggagtccagcatcaaataatctagaggtggcctgtgagggaccacctacagagttgcccctcacttagcaccctcttctcacctccccagcaggcccctaaggcaccgtggacacctttgaacagccttgctgtaacccacttcctgcagcacccacacacttcctggggctgggagcctcttagagggtttcctgagactcccaagggtgcagagggagctcggttaccttctctaaactccactgagcctgatgttgcatggcgtgtgagctgggccctccggctggccttgcccttctgcggcaacccttggccagcccttctatccccacacttacagtcaggcctctgcttcagtggatgttagatggcagagacatcaacccccagcagggccctggggcccaggaggagagctacaaggagtggggcagtaggagctggcatgagccctagaaatcatgagactccaggaggagccatgagaggggccacctgggatgggcctccgcttaccccatccaaagctacctgggcccaacaaggctccaaaacttttgaatctgagtccttccctggatgccctggatccaacccaaggcagaaaccagggaaagaggctccttctttccagtcaccccatctcccggtgccaggctctcctactggaaggagggggttgagagagcttgtactcaggtattcatacattgcaaggaagccatggacttgtttctgaaaggagtgacgcctcctcaagaagagcctcacaacttagtctaattttccatttcccttattgaaggttaggttatgtatattttcacaagtttaaaagccctttgtttttctttttatgtgtactatttatgtcattttgcccatttatagttgggctgctgggtcttgttgatttttaggaacgtttaaatataaattaaaatctggtcttttttggatatatataaaaaaaagagcctcaggcacgtccttcaggagggattccagaagaaggcattgttctcctaggagatgacagctctaggcgggttatggcccctgaaggccttccagtgggacaagatgcgaaggtggaagacagcactattgctgatcctgaccctgtaggcccaggctaatgtgcgtgggaggtcttagtttttaacaaagacagtttaaaaaagaaaaaaaaaaaagacaaagttctaaactagcaaaaacctcatagaataaggatgtaaagagaaaaaaatttttgtacagctataaaatgtgtttgtttcaagctgagtgttgttactaataagtaaagttaaaaaattaaaaacctcataacatgaaaatgttacagcaagctaaggttaatatattattgaacaaggcaaaatattttaaaaatcaatttagcatagcctagaccaggcattgtgtcatgtgtatgtagtcccagctactcaggaggctgaggcaggaggattgcttgagcccagaagttctggattgagtgtgtgcactaagttcagaatcaatgggctaacctcctgcaagaggagggaccaccaggttgcctaaggtagagtgaaccagcccaggtcaaaaacggagcaggtgaaaactgtcatactgatcagcagtaggatcatacctgtgagtagtcactgcactccagcctgggcaacacagtgagaccccagctctttaagaaagttaaaaataaaaaatgtatatacatttagcatggccaaggtgtatggtgtttataaagtctacatagggtagtttcctaggacttcacgtgcatgcatcactaactcactgacttacccagagcaaacagttctgctagctccattcatgagaagtgcccaatacatgtgtaccattttaaaaaatatttttaaaaaaattattaaaaaatattttatatcatacatttactgcaccttttaatgtttagaaatgtttatttacttactttttttttttggacaaagagacttgctctgttgcccagactggagtgcagtggcgtgatcgcggttcaccacaccctttaactcccgagctcaagtgatactcccactactgagactacagctgtgcatcaccacacgtagtcaatttttaatttttctgtagagacagggtctcaccatgttgcccaggctgatctcaaactcttgggctcaagtgatccccctgccttggcctctcaaagtgctgggattacaggtgtaagccacaatatctggctagaaatgtttagatacacaaaaactactgtgttctaattgcctacggtattcagtacagtaaaatgctgtaccggtttgtggcctaggagcaagaggccataccatatggcctaggtgtgtagtatgtagtaggctatcccttctaggtttatgtaagtacactttgtgatggtcatgccaaaaccaaattagcttgttgatagctgttgtgagaccttggttcttgtcttcttagtttaaaagaatttaaacaagagacacacagcaaaggaaatgcagcatagagtaatttattgcaaaaggaaaagaatattttgaaagttatgtgcagaatagatggtacctcctgagagagagagagaggattcaaaacgggttgttcataaggataagacagcaaagactggcactagggaggctccctttaagggagtcttcaatgattattcataaggaggtggaaagaggtgttgcaaataagcatgttctgggcagtcctctgggtgcacctgagcagtggctgtatatgcttgttcatacattgcatagctcattagcatcttaaatctccacccagggatgtgttttttactattataatgagcaaagggtcagtttgaggacaggtaaagtcaaaatgcacagaggggaagtccctactatagatagctttgctttaatcagctcaattagaatgccaatgctgagtcttattgtattgactgttctgccatcactcttgctgcatcctgagaacagggttacttctttgactacctatcctccctcaagctaatgacacattactcaggatgtatccccttcattatgaaatatatgaacatgttaaggaaattgaattgataattttaatacttctgaaaatatatcttgaagaccagatattttcacaggagccctttctttctttttctttctcttttcttttctttttttcttttcttttcttttcttttctttctttctttctttttcttttcttttctttctttctttctttctttctttctttctttctttctttctttctttttctttttctttttcttttctttctttcttttctttctttctttctttttttgacagagtcttgctctgtcgcccaggctggagtgcagtggcatgatctcggctcactgcaacctctgcttcttgggttcaagcgattcttctgcttcagcttccggcgtagctgagactacaggcacacacccaccatgcccagctaatttttgtatttttagtagagatggggtttcaccatgttggccaggctggtctcaatctcttgaccgcatgatccaaccacctcggtctcccaaagtgttgggattacaggcgtgagccaccgcacccagcctttcacaggaatattttaccaaaaaattaaagaggaattaaaaccaattttagctcacacacaccacacaaaaaacagccatgaaagagatttgagaaaattgtaaaatatacccaatttagatgatatgaggaaatttttgttaattttattaactgtgataacaatattgatcttgtagaaaaacgtcctcaatcatcagatcacccaggatggactccatttgcaactgcaggtgcatgcatgactgagtgagcagtggacgtgactatgcaccttccatgcatctctgattataggggaaattgtttgtccttcacttcctatcttcactcttccagcaggcagggacatggacaaatcagtgacccagcacagacccagcagatgaggctaatgtcttagggcatgcaggaggaatccaagcctttgaaaagtcttctggagcagagacccctcctggtattgtatgagagggaaacaggacatattttggtcaaagagaggggaatatcggccaacttcagatccttgggacaatgtctagcagaagggaatatttctctaattagcacaaatttgccgtacaggctgatagtggccctgtcttcagggcctcaaatttaccttgattcgtttagactaatcaccttgtctaatgacaagacatcttcaacaacatcccaacatctctcattgttcctcaagttctgagtttctcttctgtaaaactccaaactactggatgtttgaagcaggaagggagagtatagatgaacggaaatttgcacgtagtaaatgtgcagagggatgttgcggttattattggtcaaatatcagcatcaggacacagaagaggctcatgctgtgaccagtcacggtccccagggggcctggtccagtcttaaatgccttttctgattttcccacagcagatgccagagtctgctgggatgaggtcgcagatgggatggaaaagtttaggacagaacaaaaatgagtcagagaaagaacagcaggagggctgatctgacaaggaatggagaacataagtaaacatctgagacagaaggcaaaacacaggactccatgagcagatgatctccctgcatctctcttcctcctttaatatatatttgtgtcaaaagatctaccaagttgtgcatcaaaatcttagtaatggtgactcttggagtgtgggatttggggtagacagctgactttaaaaatctactctatgtttatagatttctaggttattttataacaagcatgactattactattaacattaaggaaagagacaaaattttaaaatcgggagtaacctcaccaagggtggcctctgagctctgctcctggtgggctgagacctctagggcaaggcttttgctgaccaccagctgcccatcatgcgccatctggtaggtgagcacatcatccctgtgggcagatatgttcaccaggagccagcttgtccagtcgtaggtgccttccatgttctcaatgaggatggaggctgtttctatctgggacacatttctgttctccaaccaggtcagctgtaggttctaggggtagaaattcttcacctggcaggtgacgttcacctggttccctgcctttatgggctgttgagtaacctccaagaagggtggaactgaaacagcacagggcagaagctctgaccttgtggcacagacagatcacagggagggctccataaagtagctcccaccaccacggtgagggcatcaccaggacagagctaggcatgcatcaggtgctcagacattgagggtgctctttgcatatgaatgaaattactaagcacaacgcccagcacacagtaggtgctcaaggactggtagctcctactaggctaagaatgagtgaaatctgcaagcacaacccctggcatgcagttgaaatgtcataactgcagcaaaatcaatgaaatcaccaggcacacagggccttggctcatagtaggtgctcattaatcgtagttgctcttggtgaaataaatgaaactatctagcatagagcttgctagctatctagcaagctagcaagctatctatctatctagcacagatgtctaccacctggtgggtggacatctagctgctaccatggaaatgatagtaagtgaccagtacatctaggtgcatggaaggtgggcagcacagttaggaattagattccaggaaatccaagccctggagtaaaagccagagaggaggagcaggcttggcaaccagatatgggattgggctaggagtgaggattctctaccttgaatggtttcagacaagttttcagtcccacaaagagggtccccctgtaaagtgatgtgggccacctcgcagatgacctgaaggcaaaggtctccagaggccagcaccatcctggctgtgctgcaggtgctatagggcatactttctcctgcagggtccacgttgatctggaagcctgagagctcattcctatttttggaccatttcagggtggtgtttcagggggagaagccgtgggactcacaggtgaagctcactgtatgctcagctgtggtcctcactgcagtgcatgataccacaggggcagaggatttggctacaaaaggagcatcgataaacaggagacatgactgagatgaccatcactaatgatgagtgtgtgacatgttaagaaccttcatggacattagtttttaatccttctaataatgtggagagggtggtgtcctcattttaccgaccaggctggaaaggctctgagaggtgaggaagtccagacctgagttcaaagttctcctctctaaacagggtgacttccaccaatctgggcacaggaacaaagttactgattggtctccctctgtgtatggactggtcctagcctgcctcccctggagagttcaccaatctcagagagtgccgagaccagctcggtcagggagaccctaacccagcggcgctagaggaattaaagatacatagaaagtatagaggtgtggagtgggaaatcaggggtctcacagccttcagagctgagagccttgaacagagatttacccacatatgtattgacagcaagccagtgataagcattttttctatagattatagattaactaaaagtattccttatgggaaataaagggatgggccgaagtaaagggatgggtctggctagttatctgcagcaggagcatgtccttaaggcacagatcgctcatgttgttgtttgtggtttaagaacgcctttaagtggttttccaccctgggtgggccaggtgttccttgccctcattccagtaaacccacaaccgtctggagtgggcatcatggccatcacgaacatgtaacagtctgcagagattttgtttatggccagttttggggccagtttatggccagattttagggggcctattcccaacaagagagggcatttacagaagccaatacagggaacaatggtgaagtggtgccattgtgagagctggaaccaggccgctcagcccaggagacgggtggcctgacacatccagctcctcttctgtaaaataggacagcatttctgcttcccgggatgcagtgaggattaaatggggccctgtttgctttggatcaaacacagaggatgcttcatataagtgaacacagttctatctttaacccaaatttcgtgaatacaccgagatctctctgaggtatttatgaatttgttccatatagttcattcttttcacaaatattccagcaggatctgtgaaagaaaatgaagtaattaaggctaaagctttaacgaagagccgagagtttgtaagaacattgcacccacacctgctaaaggtcaagccacaggatgttgctgtagatctgagtaacaactgaagtcaaggtacgtgggattttgatctctctcatcctggagtactttaagtaaccaatgaaaacaggtttgcagtttagaatttttgcccagccattgaattgtctccaaaaccaacttttttgaaaatcccctatacaaaacctttcccgcactgctgtatgagactctattcagcacttctctgactctgtatacccaaagtacaattctttatttcccaaataaatgctatttcttttggcttttcggccaatcatttgttgttgttgttgttgttgttagcaggcctaatttgtgccaagtgctgcctttccaaagagggaacgtttttggaatctgggtcttcagttgggtcaggtttgggttgacaaacaagatcactgagtactgagaaagccaaaggtggttaatgttttcatcattagttaactacaagaaacacagacccaggccatctaagcaggcaggcactcatcctgcgtcctgaaagcacacagattagagaatcagaaaaatgaaggcagtttctttccatagagaggtcctaaagggcacctccaaattgtgaattactaccctacatcttctacaacaatcaccaggaagcatatatcacacatatttgcctttgtacatattaacctgctccctaacatgtgtcagacattttgagggcacagtaaagagggtgtcacttgaagaagagaagttatcaagataccaccagcatggcgaccctaacgggatgagaggatgtaatcaatttccatttatgggagcctgatgctgcctgctccctctatacctctctttaatctttttaacccccctccatccctgtgagggggtcctaatgtgagcccctttataggatgaggctcagagaggaggcccggctggccaaggaccaaaagtggacacaaaccccaccctggtaagataagagaagacaagtgaaaagcacagagcctggcatgtcgtaggtgcttaacaaatgacccctgtgactgttttcaggaggtttggtcattactgcttctaaatctacacatttatcctttaggcagcagaacaaagaggagcagaaacaccgagaaaaggctcaaaccctgctccctgcggctcatgacaaacccaaatgacaaaaggagcagaaaccaccaagtgaggattctctccccttttctgaacaatcccctcaggaaacaagtttggcaaattggctttcaaaacacaaacaagatcacagatgcttccctccagaggagctatttacagaagctggaagcattttggaaggaataggaaacagattcctccatgacatcttcgtgtgtggaggcagggaggctcctggggctgaggagtgaggatttgctgggatttcagtgctgtttaaacacaaacttgttaaagttgttcccaacactgaggctgggatctgagcaggacttagaccaggcttctcctccttgtcccctaaggcctgctccatgggaagggtcctggccaggccactggggccttctgagatgtctctggcccatgttattctgaagcatccacatccagaaaagctgctgtcaatgctcaacacaatggaggaccacttttgctagggggctgtgtattagaatcttctggagtcactgagaactttgcatgcccaggctcatgtcagaccaattaaactggcatttttttttaggagggagccttgggctggatttaaatttttttttttcaaatttcccagatgattctaatgagcagccaagatcgaaagccaccagaccccaccccaaaccccatgtatccttgaggcctggagaagcactgacccatctgaggtctcatagcttcgacatcacacagttcatatttatggaacatttactgcactccaggtgctgctctgagcatttaaaaggatttaactccttcagtttctgtccccagtctgtgaggtcagtgttatcatcaacaggtgcggacactgagactcactgtggtagagcaccttgtcccaggtcacagagccaggaagtaccagagcccggaagtggcccaggcagttgggctcctgcctgccctgcactaaccactgttctgcggaagctcagtaataacctgaacaacaccaccattcaggactctgtgcacatcctctcccatcctcacagaacccagagtgggtttggtgcatgattatcagcattgcacagatagggaaactggggactcaagggaaggcaagactggcccaagatcacaagaaataacagcttgatttaggggtgcctacaatgtgctaggtgatttacagagagaacctcaaatcctatcccctctcctaaaggagtcgtgatgatcaccattttacagatgaggaaactgaggctgagagaaatgaaggcactgcctccttgtcctccatgtgtcccagtgggcacttcctgtgtcctaccaagcactcatgtccattaacagagcaagtgccctgaattcttgagccccaacactgactgcacacccaattgtccctttgagattcttgactttatgcaattctagagagaagcctccctcctgggtgcccgggcccagataccctgtagccataaaacactatgggctcctgacagcccaaggggagaatggaaactcttgcttacagtggccccactcacccactacgaaatacctcatctcctcatccttagtcctcagcaccaagaaggggtgggcacgtgctctgctgggctgcaggaggcccgactttgctccacagatgctgctgagtgaaggagaaacagcacaacatgggggaagagtcctaaatgcttcatgtgtgctgagacctgtcctttaggaacaggcttgacatataatgagccatctgcagaacctttctaaagagagtgtaaagccagcccctcctacccctacaggactttttttgtttgtttggtgttgaatgctttttgctgtaaaacagagcaatgcaagagtttagaatgaggttagagcatttcttcacactttaaaaagcatagctgagggttgcagagacaggggctgtgagtcaggctgggttgggatcagaccttggctccctgacctgctcaccactcaggtctcctctctgagctttagtgcctcatctttaacccataccctgtttgctccaagaatactcttgtctctaattctaatgtaacatcaagtacatttctgttacattaggattagagacaagttctgtttagaaataactccaagaacagtttttatattttattttcacaatgaaaatcagtcagatttgcttcaacctcaaagagcatgtttgtgtaaaattaaatgagctctggcagtgagctgcactgttttttttctttctaagtgggttaaaagaggcaacaagtggctcctccttcctagaactggttatgaggagactctggcacagctgctgctccctgcttccctccctgcctccctcctttctcatccagggatcaattaggctgataatatggcaaagaggagtgagcacttcactaggaagtagcagattggggtcacacctgagccacttactcgatgtgattgcctagggtgggaatgcatcaactgggaacttgcgtctttatctgtaataactgcaaaatcaggataaagcccccttctccatctatgtttaagggttgttaggagtctcgattgctaatgatctaggaaggaaattaggcagtgttcttacatatgaaaacacacacaccctctgacctagcaatgccacctccagtgggcatttgtcacctgagtaggataacacatgtacaaggtcacccactgcagggttcttttaatagttcaacattgggagcaacttacatatttatcaacagaatactgtaaaacaaatttgatattttcataaattggactattctgcagctgtcaaagagtggaacagctctctatgtcctgacgtggaatctcaataaggaatgatagggtttatgtttggaagagtttttccaatcaccaatgggctttagtgtctgaatgtgaggtgcattctgagcctttgggaaaccgatgaaaaggagaattgctggctcttcggtcagtggttttgtttaaggagcttttatttagctcctcgaacatagtccgtgttgtttctctttgtctagtctgaaatagttgttacctggggaaagtagccttctcttggactgtagattaattcgtggcctggtccagctcctctgaaccactggacaggccccacagggaacagggaggtcgcagtgcagtgcagagtggacatctctccagctgcgactgacatgaacttctcaggctgaatcacctgcaactcctcctcagctttcactttcatgacaaagcagtcatttattcatccttacatgatcctgtgtgtttcctcatgtgtatcaaagactttcattgatcgagtgcatatcaggagcagagcttgagctcagcacattgcatatattatctcatttaaccttcacaacaagcctgtagcttgttgtgacatgagactgtattagaagtgaggacaatgaggcgcagagaggttcaattttaagatagagcttaaacatgagactgtattagaacatgagactgtattagaagtgaggacaatgaggcacagagaggttcaattttaagatagagctttgggttgaggacctgaatggagctcctgagccctctttggaagtgtcatactttgctaaatatttttgccttcactttctggccatatggagtattgcaatttctggaccatttcattgactgaggtcatgtaactgctttagaccattgagtcatgagtagaaatgatgagcataatacgtggactgtgcattcaaatgcaagaacctctatggatcaccttctcccttccgcagagacccacaaggctctgatggagtctgctccatcagcctggattcctgagtgacagtgacatgcagaatccccaacacaccatgaagatgcagcttaaaaagaaataacattgttttaagcccctgggaatttttcacccatagcataagtttcctaatgctgatacgactaattaccaaaacttggtgtgttacaacaaaagaaatgtatcatattgtagttctggaattcagaagcccaaaattgtgtgactgcgttacaatcaagaagaaaagtcaagtatgtaaaggtgaagaataaaatggtactgaccagggtgaagtgcagggaggtaatggtgagatacaggtcaaaaaatacaaaattgaagataggtcagatgaggaagtccagagatcgaacatgccatatatcgacaactagagttaacaatattgtattgaatttagtatttttgcttaaagagtatatttcatgggctcttgacacacacccacatgcagagtaactgtgagatgatggatatgttcatttgcttgactataataatcattacactatgtatatgtataggaaagcatcatgtggtacaccttacatatatacaatttttttaaaaaacagctatgttttctggagtctctgttctttgcctttactaattctggaagctggtaacatttcttttctcatagttacgtcttcccatcactccagcctctggcttgcatcctcacatgtgcttctctaactcctaatttcctgcctcctccttcttataaggactcatgtgatacactgtgggcccaccctgatgctagaccaagatgttaaaaccactgtcttcaacacgttcaaagagctaaaggaaacaatagacaaacaactaaaataattcaggattatgatacagtaacaaaataagaactgtaacaaagagaaattataaaaagaaatcaaacgagaactttagagttgaaagtattacaactaaaagttcattaaagaggttctctaacaagtgagcaggtgggaaaaaaatcaagaaactggaagatgaaatcattgaaattattgacagtgaggtatagatacaacaaaaatgaaagataatagaatctaagggaatgatgatacattatcaaatcgataaaaatacacattactagagttctgggggaaaagagaaaaagagaaaggggcagaagattattggaagaaatcatgaacaaaatcttcccaaacttgataaaatacatgaatctacaagcttaaggtgccaaggaaacccaaatttaactcagcgataaagtcaaagagacccacattaagacacattataatccaactgtcgacaattaaagtcaaggaaagaattctgaaagcagcaaaagagaagcgattcctctcacgcgagagatccttgtaagattatcagctgagttcttatcagaagcattggaggccacaagacagaggaatgatatgtttaaaatgctgaaagaggaaaaacctatcaaccaagaactctacacctggcaaacatccttcaaacacaagggagaaattaagatattctcagataaatcctcagccatggatccttgcgtgaatagcacgatgtctccaggcccaaacttccctgatctgtagaaggggtggcatcaggtcatgaaaatgagcacccaccaccacacccaactggtgtggtgagagtttatgaccactaaaccttacctacaaaaacgctaaaaggagtgctttgggtggaaatgaaaggatgctacatggcactcaaaattgtatgaggaaataaagatgtccagttaggtgtacatttaaaaaattcatattttcctgatgcctcaacatccctgaaacaagctgtgagcaccctaccaaatgaccaggtacagcagtgtgataaagctggtccctgccacaattcccctttttgtcctcctctgctgtgacctagtagagtagtggcattaaaacataccagtgaatccatcatggtttttgtgtcctccaccctaactcccagtaagacacttgcctggggttccaatctgtcttgcttccccatctgcttggttgagcctgcttcacggaagctccttccatatggcttcctacctggcatgccataccccactctctgggaactatgagtagaataaattgttcatcttcatatgtctctccaaatgaaattttcacagtcatgttagagtgttctttatagacccaatcagcaggacttactctaccattttcaacactaatggcaatgagaatgggatcattctaaactagggtggaaagttcctaggagattccctttgaatgctcatggcttgctaatttgctactctgattggctcaaccatttgggagatgctattaccctgatggctttcttgtactctgctttcttcagctttgtgttgccttttgggagtgttaccaagactctccatcctaaagtggggatcatgtctcaatatcaataatggcatccacctttcttcaggagcacagagatgacattacattgataacaacatctttaaaacagattcatttgacacacgtattaatgtcatataatccaacacctttaagtttctgttaaatgctagtggcaacatattcttttacacatcatcgaaaacaatactcttgttagtgccttcaaacaaacggacaaacaaacaaaaatacctcttctctataaaaattttgccaacttctttcatgcctgttggagtctcttcaccactcatgttggccatgaatttccccagggcttttgatgcagaaacaatgcccctcttggcctcatcctatattccattaaaacaacaaatgactggttacctactgggatcccctggtctggagtacagttctacaaggcatactttcctgttgcaatcattaaccataaattgtcccacatccaggctttgctcacctgatatgaagcgcattggaaactaagcttccactagaacacaaaattaaaatcactgccaggtccagctgcacaccattctgttgacagttggcattattactgctaggtttgttaatgcaaaaatactcaaccaaatactagcaaactgaattgaatagcatagtagaaggataatacaccatgagcagataatagttattcctgaaatccaaggatgtttcagtaaacaaatgacaacaatgtaatgtaccatatttatggaataaagggaaaaacacatgattatccatttgatgcagaaaagcctttgacaaatgtggctatctttctatgacaaaaataatcaataaaaggaatatatgaaaacattcaaaattataagtcatatactcatactttcttgtttttttggcactatctaatttactattcactgtctaatttactattttatttacctccttatcatgggtattggttactgtcattctccagtggatataaggaacaaaagggaaactactttttctattttattcaccagtgcacccaacatttctatgtcaggtcctggaacatagtagatatccaataaatatgtgtataatgtgtgaattgctcagtgggatactttcttaagagactgaaatcttttattttaaatggattgtttctgttgaatttggagaaaataaatttcccatgtagatgagttggtgaagaaaaaatcaatttgcaatcatacagaaagcagaagagcccaggagaagaaaactacacatcctcttcctcataccacacccctgcacacactcatactagcagcagctgcagaaatctcatggaatagaatcagggccagaagtatttgggaagagtaatggtgaaaactgtgatctctagattaagagtgcctgagctcaaatcatagctctgccaattaccaatgaatgaccttggaatgctttgtgcttctgtttccttatctatgtgtgtgtgtggtggggggcagggggtgataagaatctctaccttggatataatgatcatccaaagtaagagctgtaagatgtttccaacagtgtctgccacatggagggtgttcaaaaattataaagttggccaggcacagtggctcaagcctgtaatcccagtactttggaaggctgaggtgggcagatacctgaggtcaggagtttcagaccagcctggccaacatggcaaaaccctgtctctactaaaaataaaaataaaaaaatagctgagggtggtggcacacccctgtggtcccagctattcaggaggcagaaacatggcaatcacttgaacccaggaagcagaggttgcagtgagctgagatcgcaacactgcactccagcctgggtgacagagtgagaccttgactcaaaaaaatgaataaataaataaaataaagtttttactcagtagatttcctgaagcttggaggcttcaatggacattagatgatgaggatataggtatgactatggatatggatataactaatataactatagatatagttactatatagatatagatgctataggccgaagtttctgcaactttatccacttctttcttcctcacacctacccttcatgaaagtgggaacactaatagagtaatgcatggaagttctattttgagggactatgcattttaccaagaggtttgcttatctattgcttatcttaacagattgggggactttgaggggtaagatcagagaagtaaaaaagaagagagagtgtgggcaacagggaaaaccaaatatctctttaatgtgcatttcatatagactaagaaatggttagaaggaaataataagaaaagtcttttaaaaatcctgtgtgtgtttcgcatagtcaagtgagatttatcccaggaatgtaaggatgggtcgatattcagcaatctctccatgtgacacactacataaacagaatgagtgacaaaaaccctatgaccatctcaacacaggccccaaaaatgcatatgaaaaaattcaacatttttaagtgataaaaactgtcaatgaattacatataggatgattgttcctcaacataataaatgccatatgggacaactccataaaaatgaactcacatatttacacttaattgatctttgataaaagtttcaaggacacacaatagggaaaagtcaatctcttcaaaaatgttattgagtaaactggatatccatgtatagagaaataaaattggaacttcatctcataccacatacaaaaatcaactcaaaatggattaaagacttaaatgtaagatctgaaactgtaaagtactagaagaaaagttctgtaacattggtctaggcaatcagtttctagatatcagcccaaaagcacacacaacagaagcaaaaatagacaaattgaattacaacaaactaaaaagcttctacatgtgcatttctcgtggatatagaaatgaatgtgggattacatacatagccaagaaaacaatcaacagagtgaagagacaacatacagaatgggaaaatatatttgcaaattatacatttgataaggagtcaatacacaaaacatataaagaactcaagcaactcaattataaggcaacaactcactcaattaatatatgggccaaagacctgaatagacatttctcaaaagaagacattaaaatggccagcaggcatataaaaaatacccaatcttactattcatcagagaaatgcaaattaaatccatagtgaggtatcatctcacacctgttagaatggttattatcaaaatgaggaaatttaagtagcattggagagtatgtggagaaaagagaatccaacccactgttggtgagaatgtaaattagtacagccattattgaaaacagtatggagtttcctccaaaaattaaaaatagaactatcattagatccagcaatctcacttctgggtgtatatccaaaggaagtaacatcagcatgtcacagcgatatctgcacccatatccattgcagcattatttacagtagcaaaaatggaatcaacctaagtgtctatcaacagatgaatggagaaagaaaatgtggtatatatacacaatgaaattctaatcagccttacaaaagaaggaaattctgtcatttccaacctggaggatactatgctaagtgaaataagccaggcacagaaagacaaataccacatggtctcactcatacactgaatctaaaaaagttgaactcacacaagtagagagtagagcctataatcacagcactttgagaggctgaggcaggtggatcacctgaggtcaggagtttgagaccagcctggccaacatggtgaaaccccgtcactactaaaaatacaaaaaattagccgggcatggtggcggacatctgtaatcccagctactcgggaggctgaagcaggagaatcacttgaacccaggtggtggaggctgcagtgagccgagatctcaccattgcactccagcctggacaacaagggtgaaacaccgtctcaaaaaaaaaaaagaagtagagactagagtggtggttaccaggggcaggggagggggtgtagttgggagatactggtcaaaggatacaacattttagtttagataagagaaataagtttaagagatgtattgtacgatatgatttctagagtgaataacatgaattgtattgttgaaaattgctaagagagcagagtttataagttctcaccacaaaaagtgatatacatgtaaggtaatgcataggttaattagctcaaattaatcatgtacacatattttataatatgttgtacatgataagtatatatgcttttctcaaacaaaaataaaatacatttcttttctgagacatttcattgcaaataaaaagataacaataaatgtgaaatcttatgtacatgtatgtacacttatagtcacttatacacacatatatatatgtatacatatatacacatgcattcacaaatatatataaaagtttgttctgtccttatactatataaagatgttttgtgcattaaataaaattatgaaacctgttaaaatctcagtaaaatatttggcacataaaagtcatccaacacatttgtaacaaatgttgggagtatatacaccagcgttttaactctgagtgtcacttctctgactggtgtgatgggtgatgattattcctatgtttacttccctgcatgtgctaatatttctacaagtagcataacatggctaaaagaatgaactctggagttggtccacctggacttgaatcccagctgctccactgactgaggtaggggacaatggacaagctcctccctctgcctgactccttgttttcaaataggagttaataggtgtagctttcaaatagggatgttgtgaggattagtagagttaagtagagttaaaatacacaaattactaagaactgtgtctaccttgtaggaagagctcaattgctgaactcttaccactgtcatttgggtaaagtgtatatgtaagaaagataatttgaaaagtgagaaccttgtcctctaggacctgtgaggtgactcacagcaggggccagtggggagcagggaggctgctgtgcccagccctgtgattctggggtcagctccctggcctgagtagggtgtgaggacaggcagcctgtctgtgggctgtgagcagggctctcccaggctgcaccaggaaaggtcttccaatcctgcctgtcctggggaagggaaaataaattctccatggtaaagtcgaaagaaccaaggtagattgtggtacttgttatgggctgaatgtgtcccccaaaatgcatgtgttgaagccccagtccccagaacctcagaatttgactgtatttggagacagggtctttaagaagctatttagttacatgaggtcattgggggggtcttaatctaatatgactggcgatctcagaagaagaggagatgaggacacagacacacactgagggaagaacacgtaataagacacagagcagagacggccatctacgagccagtaagaaagacctcagtacagactaaccctgccaacaccttgatcttgcattcagcctccaaaagtgcaaggaagtaaatgtctgtaattttagctgcccagtctgtagtactttgttatgcaagccctaggaaaggattacagggcccagaaagcagcaaattccttcttaaagaggaagagggcacaaaaaaatgggtggtaacactgagattacagaggagtgggaagcagggggaacagagggcaaagtatgcagcatcctgaagaaggacagtggctgaacatccccgggaaacattgctcccctgcccaactcaggcactgtttcagacttcacatcctcagggtgctgaacagagggctgagcctggagccacacaccctgtcaggctgtctctcagctcactctgtggccttgggcagatggttttgcctcctggagcctcaaggctccagcctcaaggctcctgctcctcagtttggggcagcagaagggttcccaaaacctactgctcaatatttgacaggaaccaggtctgcttctggtaaggatttaaataatgattcttctgtgtttgtcaaatgaaatattatttttaaaatgtaactaattatggtgctggttgaaggatcacctgattccatcccttggtagccagctgcagatccacagagaaagtgctcagctccctgatcttctgctctcagacaatgcccagtccttgacctaccttgggagcacttgtgtttgtctggaatccctgaaagcccaggggcagggatttcagggctgcaagcagagagaaagggttctagcccaaggcagtgctcacctgtgcatccccgcagcagaatcagcagcaggaaaggaccaggagggtggggccaggaggctgggatgggtatcctgaagacctcaggagcctgctccgtccaaatatctgtgctggggagatgtcaaacttctctgaggagagaagacaagcactgtctcccttgattcaagaggaagtggcaatgatagagtacaacagtgaaatagaaatcaggcacagtaggcagttacaacgcaaacagttactcatgctccattctcaggagaatcagacaggcttagcagaaatagtgcttcctgcacaccttgaccatatgttctctccacatggcccctaacaccatcttcaggtcttcttggtgattcaccatttggggctgttagttcaagaaggacctgtgattaagaactgttttctaaacttcccatctcaagaccctaggatgttgctggcttgttttcttcttctgcaccaggcctcaaccaagtgctactcagttcggggcaggaggagggttcacaaaagctactgccaatatttgagaggaaccaggtgtgcttctgaaattgttccctattccaaacttttatcaatgtaactggcaaaacttagcccaaattcagtctaatctgggaccttagcagcactttcatgtgtctgcatccagcagaaggaatcatctcctgacttcctccaggagaggaaatgggtttaggttaataaggatatgctttgtgggctgaggtgggaattatggttatgggttatggagaggggatagggttatgatggggggagaatatggtatgcaatttcctggggcagtcacatcaatagtctttgttttgcacacagaacacctattccatccaccactgcatttagattggaggtgaggagagaggaagaataaatactccaaccaagaggatgtgttaaggatttgaggaagtcactgggccctcctaggctcagttttgttctccaaattgcaaataataggtttttcactgctgtgtttttgtggatgttaaaagagatcatgactgtaccatacctgaaacccagtaggtcattattgataccatggtgccaggtgaagagaaggaactcaaaattttttgaatggatccctactgcaggctgagtttcccaccagtggctttctccgagatttccaggcccctgagacccagcttatatggtgtacttgaaatatccctgccactctgagatcagttgcttcctctggatcctctgcaccctgcttcttgtcaatgcataaatgaattcctctctcacaatatcgagctgtgtgactttaaacaagacacctaagttctctgagccttagcttgattatatgtaaatagaggttataacatgtaccttgtaaaggtatggtaggaataatataaaccgtaccgaatgctcaactcataattaattataactaaaaaatggtggctatattaatatgttgtgtacagcaagcattcactgcttccctgtgacacttgtgctttagaaaaattaccctgttaggagaaatggtttctccttcatcatctatgactaagaaaggcctgtgtggaaccctccctgtcacatgctgggtttgaagtccttcatctctcagaagtaattgtcaaatgaaattataaaaattatcatatttccatccaaatttctttttctatgtggcagatgtacagagagtgaaatcttcacctcctgctccatacccacagaaacgaatataaaaaatgataaaattaccttaatcaatgtctacactttaaaacaagaaagtagtctctatatgccatgaaggaatagtagaaactattattttttgcagatgtcctggacaccagacatggtatccggcattttatgtcagttacctcattaattcaacactctgaccctgaggtaagtgctaccattaaccttcatgtaaaggtgagaaaatctgaagcacacagagagtagcaagtttgctcaagatcactcagcttttggattgagacataggctgtcacactgcacagccttcacttttaatgtttgcactatgaccacctctcataagacaggagggacatccctctagaagtaagcagtgaagaagccacagactcagttaggagcagcccccacagtgaggctggggcaggtgccatgcttcacgagcccctgacaacccaagatcacatggggcattattcctgcaaagacggcagtgcaagcagaaatcactaaagatttggggaacagcagcaccacaagtgatagctaaccaatccaagaacaacaataacttaaaaacaataaaacagtaataaaaagaacttcacacctgagaacacgttaaaaaataaaatatgagaaggtgttcaagattagaatatttaataacctataaacataacaaaaaaagcaaatccataaaacaaaaccaaccatgtataaaacaagaataggtagacatggagtacaacaggtatctcggcaatgtaacaaagcagaggattttaaatatatatataggtttttaaaaataactaggttgacatattagtttgttcttgcattgctatacagaaatacctgagactgggtgatctataaagaacaggggtttaatcggctcgctgttccacaggctctgcagaaagcatgatgcttgtaccttcttggcttcagaggaagtctcaggaaacttacaaacatggcagaaggcgaaggggaagtaggctcatcttacatggtcacagcaggagggacagggagagtagggaggtatcacacacttttaaacaaccagatctcatgagaacttgcttactatcatgagaacagcaccaagagggaaatccacacccaagatccaatcacctcccaccaggcccacctccaacattggagattacaattctacatgagatttggtggggatacagatccaaaccatatcagctgagtaagctgactatacataaatgagtagtaagtagtgagctgggtcatcacgtaggggccatctcctaggacccagcacaaagagacacatccaaacaaagtaatgtaaacatgtataaatatagcaataacaaagaaataccataacatactttgcaaaattttgtgctagaaatattaatatcttaagaagtataatttaaggcaaaaagcacaaatggttgaaagaggaatatttccttttatgaaagtaacaactacccggaagatatgagtcacaaaatattatacctccaaaactataatttggaatatatgactcaaatattgatagaatagtttcaataatttggcagaatctgtacttggagcagcaaagtgacttcctgtgaactccagtccttcaataaagatctattagatgcatagatgctatgtgagtgaaaaaattttgtggaaatcacgtggagaattgagtttcaaatttaagttgacttcgtgcagtacagttacagcctgaatgtttgagagaagcaggagcctgggaaaccataagctaaaattctccttctgcgaaatttagccctgcactcatgacacaaggtgcagataatgagatatggctgtgggaaaagggaggagtcagtggatgtttgagaagagcacagtttaaacttgtgggcttaggaatcagaacttctaggtttgaatttagttctaccagtcctggctgtgtgacctaggggtatttgtttaacatctctgtttcttcagttccctaaaatggaaataatagtcatatcaacttcataggtttgttaaggccgtaaaatggattaatatatgcaaattacttaataacagctgaccgtgttccaaaagttagatatgatttttattaggtggtattttggtaatagtaatagttttaaaaaacagactctctgccctcaaggatttacgatgcagtgcaacaaccctggccaatggctgggggatgtgcaggtaccaccacatgatgagtgtgggtcatgtgtccagccttataatcacaaagtcattactagcaccagggtcgtggtgtgggcttggcctcagggggaatcactatgactagggcaaggcacatcccagtaagtgtctacacagatgtttatggaaaaggagctccaagtcttgtctcatgcagggatgggagagaagaaagtgctcccagagaatgtgacacaggcaaaaatcttcacatgaaaggaacttttgcagagatttcaccactttgaaagtacaaaggggaagagctggcaagatggtcgaataggagcagtgccagtctgcagctcccagtgagaccaacagagaaggtgggtgatttctgcatttccaactgaggtacccagctcatctcactgggacgggttagacagtgggtgtggcccacggagggtaagcagaagcagggtggggcgtcacctcacctgggaagtacaaggttttggggaactccctaccctagccaagggaagccgtgatggactatgctgtgagggacagtgctatctggtccagatactatgcttttcccatggtttttgcaacctgaagaccaggagattcccttgggtgcctagaccaccagggccctgggtttcaagtacaaaactgggcggccacttgggcagacacagagctagctccaggaatttttttttttgtaccccagtggcacctgaaatgacagtgagactggaaagggggctgaagtcagggagccaagtggtttagctcagtggatcccacccccatggagcccagcaagcaaagatccactggcttgaaattcgtgctgccagcacagcagactaaggttgacctaggatgctcaagcttggttggcggaggggcatctgccattactgaggcttgagtaggtggccaccaggaagttcgaactgggcagaacccaccacagtgcagcaaagccactgtacccagactgcctctctagattcctcctctcttggcagggcatctctgaaagaaaggcagcagcctcagtcaggggcttatagataaaactcacatctccctgggaaagagcacctgaaggaagttgtggctgtggttgcagcttcaggagactcaaagttttctgcctgccagctctgaagagaccagcggatctcccagcacagcactgctctgataaggggctgactgcctcctgaagtgggtccctgacccccatgcctcctgactgggagatacctcagaaataacaccacacatgtacaccatctgatctttgacaaacctaacaaaaacaagcaatggggaaaggattccctatttaataaatggtgttgtgaaaactggttagctatatacaaaaaactgaacctggaccccttccttacaccttatacaaaaattaactcaggatggattaaagacttaaatgtaagatctaaaaccataaaaaccctagaagaaaacctaggcaataccattcaggacatagtcatgggcaaagacgtcataactaaaacaccaaagcaattgcaacaaaagccaaaattgacaaatggaatctaattaaactaaagaacttctgcacagcaaaagaaactatcatcagagtgaacaggtaacctacagaattggagaaaatttttgcaatctatccatgtgacaaagggctgatatccagaatctataaggaacttaaacaaatttacaagaaacaaacaaacaaccccaccaaaagtgggaaaggatatgaacagacgcttctcaaaagaagacatttatgcagccaacaaacatatgaaaaaaagctcatcatcactggtcattagagaaatgcaaatgaaaaccacaatgagataccatctcacgctagttagaatggcgatcattaaaaagtcaggaaacaacagatgctggagagcatgtggagaaatagaaatgcttttacactgttggtgggaatgtaaattagttcaaccattgtggaagatagtgtggtgattcctcagggatctagaactagaaataccatttgacccagcaatcccattactgggtatatacccaaaggattataaatcatgctactataaagacacatacacgtatgtttattgcagcactattcacaataacaaagacttggaaccaacccaaatgcccatcaatgatagactggataaagaaaatgtggcacatatacacaatcaaatactatgcagccataagaaagaatgagttcatgtcctttgcacggacatgagtgatgctggaaaccatcattctcagcaaactaacacaggaacagagaaccaaacaccgcatgttctcatttataagtgggagttgaacaatgagaacacatgtatgcagggaggggatcattacacaccggggcctgttggggggtgggggggcaaggggaggaatagcattaggagaaatacataatgtagatgatgggttgatgggtgcagcaaaccaccatggcacatgtatgcctatgtaacaaacctgcacattctgcacatgtatcctagaacttaaagtataatttaaaaaacaaacaaacaaacaaattgcaaaggataagatgttggaaacaaattcaaaattaggaagatgatgaaacaccaaggtagaaacaatgcttgctccatatcagaaatgcacaagaaggtggcaagcactgatccaactactcttgatacatttttacaaatcaataaaacacttgaactctcaatgtttctaatgctttgaattacagtgcactaataaatgtttatttcattacatttttattgcctcctacgtttgtaactttgtttctaatattttgacaaaaaattgtaaaagtcacagaatgatcattgtttttccaattggatatggagattgctttcccaggtttcaggttgcacggtcatttttacaatcctgcattgccatgaaaagtgagaactgcctgtattcagaataatacagatggtaatatgtgctaaggaaaaattcatcatgttaagataaattagagtatcagggtagggagggaaattgatattttatacagggtggtttacattagtagacattaggcagaaagagttgaaggagggatgaagggaaccatgtagctgtgttggagaagaagcagaggagtatacaactagacttttccaaagaatcactgtggctgaaaactgaaagccagtagaggcaattggaatgctaccagaagagatgatgctggctgcgacagggaagggtggtggaggtgagaaatgcatgaattaggcatgtaactcagtgctgtgctggagcagctgagagccaattgttaaattttaggaattttgcaatctggttgtttaactgttgatggcttgaaactgtctatgttgggaattttcatactacagagattggcaagcactacaaatcagctttttgtttttccctttcagaaagtccattgttaaacatttactgtctcatataagtggacataagcatttcaaaggcagaattgaatgcagagtataaaaaaaagagagtgagaaatcaaggaggactccaggatgttggactgtggcagcatttctgccacgagcagcagggctgggaaggctgcaggatgctagcagaactagtgtcccatcacagagaaagcagggagagcttctttctttcttggtgtgagacaaagaggaaggagaatcattttttcttaaaattgggatgggggttcatttgtattcaggaggcaatagtgaacctcaacaaggctgggaagttggagtaggcaggaatccagatggcagaataactcttgaggggctagagagagtctgtggtttatggccagtcccaaggcgatggatgcaaggagtcctaatgtgtttagatttggcgtgtttcccacatcctagggaggtgtcgtgagtcactccccagagccccatcccatggcctctgctcaggaccatgaatgaagaccctgctatggagcatcaaggactctgcaaaggagcaacaggagcctgtgggcaggaagatgtcctgggaggacaggcatttggagctgagtctggggaagcttctcgccagctccttctctccagctgagcccttcaaggaaggaaggaggcagcacagactgagggtcccacatggcaggggaggaggaaaggagctgtgggaaacacatccacatttagtcatctgctcatccttcaagaaatgattcctgagactctgctatgtcctcagtgctggtcttcctcttgggatgcctattatgggtggacagggagccctgagatagaatttcacctgctcagccctcctcccaagtcctgatgccctttccctcatccctcccactcaggcgctgagagcctgagagcactaagagcagcccacttgaggcgtctcaacagtactctacagtggggattccttagatgccacggagtacagcatcaaataattgagagatggcctgcaagggaccacctacagagttggccctcattcagccccctctccccacctcccctatgggcccctagggtgctgtggacacctttgaacacccttatggtagcccacctcctgcagcacccacacacttcctggggttgggattctcctagagggttccctgagacttctgagggtgctgaggaagccccatcaccttctccaaactccactgaccctgaggctgtgtggcatgcgggctgggtgctcctgctggcctgaccttctggagcagcccttggcccaccctccctcctctacacttacagtcaggccttctgcttccggtggacataggcagcagagacatcaaccagcagcagcaccttggagcccaggaggagacctaggaggagtgaggcagtaggagctggcacccggactggaaatcaggagacaggaggatccattagaggggccacctgggaggccatcccaggggcctccacttaccccatctgaggctacctgggctgttcagttctccaaagcaagagttcagaatgagaagtttggagggattctctatagtttaacaagtgcgctgggtgttgcagagacaggggctatcaatcaggcttgtgggattcaaaccttggatccctgacctgttcaccactcaggttccctctctgagcctcaatgtcttcatctgtaaaagggacagcaaatggctccgacttcgtagcactggttaaaaggagaaaatgccaggatgacggtacagtctctgacacaaccgctgctccttggccccctcccacctccctcttctttcatccaagtggtcacttaggccaatagcatggcaaagaggagtgagaaccctactaggagttagcagatctcagttaaacctgagtcacttgctagctgtcattgttccaggtatgagatgcaccacctgggaattttagtgtctttgtctgtaatatttgcaaattaggataaagccacattcctacctatgttcaagggttctggggagccttgattgctgtttcatctaggagggaaattaggcaacatccatttaaattaaaacacatacactctctgacctaacaatgcaacttctggcaggcatctgccaccagagtaggataacatatgtgcaggttcacccacagcagaattgtttcaaaagctcaaggttgggaaccacttacatatccatcaacagaagtctgcaaaataacatttgatatttccataaattgacatattctgcagctggtaaacaatggagcaggtctctatgtccttatatggaatctcaataagaaattatatggcttgcatttgggagaggttttccaatcaccaacagagcacagagaatgaaggagagaggcgttctaaacctttgagtaactatgaaaaggagaaatactggcttcctactcggttcttttcaaggagctttcattcagcacctactacgaaccagactcttctatggagagagtatctaatgccaggatggaacgaagcctgcctggagtaggatctgggctcttgccccaaccctaactggccctgtgaccttgggcaaggcccctgtcatttcttggcttcagtctcccatctgtaaaagggcattgggctaaatggtctgaaggtcctttttgcactgatattccaggattcaggagttaaattgaggaacctgggcctctgaaagaaaacccaaaataagcattctgctgccttaactgggggacccctaagtcacccatatagaggacctcttctcttaggcgagggacattctgagatggcctagctctgcttgaaacctttagtgactgtgtgaggcagtccctgaatcacacaagggtttcctgaacaacccacaaacatcctggatagacccataaagctcttgccgtctcctttcaccacggccatcagattaaacagtgaatctgtgtccttcaggaatcttcccagtgtgatggttctgaagattatataaagaaaaacccaatttactccctcagtgctctggatggatttatcctcattagaagggaacagaatgtaagcttggtgaaagcagagcttgtgcctttttttttttttaacaactatttgcccagcaaccacggtggagactcacacacagtaggttctcgatgaatgcttgttacgtaaagaagagactcagccaccctggggggaaagtgctctgtggacgcagcaggcaaggtctagccttgtgcctgggaaaatcactcaaaccatcagctcccttatctgtggaaacatggctgggccagattagaagaggcaaaggctatggtgccaggcagactaaggtttcagacttccccatcatttaccagtcacggagacttgagtgaatagcatgacatctccaggcctcaatatacctgatttgtagaagagggtggcatcagatcatgaaagtgagcacccactgccacccttgattgttgctgacagaggacagtgctattattgacttcttgtcataccttgggggatgaaggaggcctacactgtactcaccacgcacagacatctgagtccctggtccagacttaatctccacgttggcaggaattgctctccggagcttcatacagtagtaggtgccagcatcttcgagggtgatgctactgatgcggatggaatagtctgtgctgtttctctttctctggtctgaaatagttgttacccggggagagtggcatctttttggactatagattaatttctggcctggacaagctcctctgaaccactggatgggtcccacagggagcagggaggtcacagtgcagttcagagtggccatctctccagctgcaactgacacaaatgcctcaggctgaatcacctgcagctcctcacctgccactcctagaaagtaacagagcagtcatttactcatccttacgtgatcttgaatgtttcctcaagtgtgtatcaatgaacttcaatgactgggtgcataccaggagcaggccttgagctcagcacactgtgtgtattatctcatttaaccctcacaacaagtctgtaacatgagactgtattataagtgaggacactgagacacagagaggttcagtttcatggaagagcatggggttgctaacctgagtggagctcctgatccccccttggaagtgtcatgctttgctaaatatttgtgcctccactttctggccatatggaatgttgcactttcttttttttttttttttttttgagacggagtttcgctcttgttgcccaggctggagtgcaatggcatgatctcggctcaccacaacctccgcctcctgggttcaggggattctcctgcctcagcctcccgagtagctgggattacgggcatgcgccaccatgcctggctacttttgtgtttttaatagagacggggtttctccatgttggtcaggctggtctcaaactcccgacctcagttgatctgcctgccttggcctcccaaagtgctgagattacaggtgtgagccaccgcgcctggccagactttctgaatcattgcattgggtggagccatgtgactcctttaggccactgagttgtgagcagaaatgatgggtataatttgtgggctgtgcatttaactgcaagagcctctgtggattaacttctcccttccacagagacctacgaggctctgatgaggtctgctccatcagcctggatgcctgaatgaccatgaattctccacacacactgaacatgcagcttaactaacaagtacaacattgttttaagcccctgagaatttctcacccatagcataattacattaccttagtttcctaatgttgatgtgacaaattatcagaacttagcatcttaaaacaaaagaaacgtatcatcttatagttctggaggtcagaagtccaaaatcatgttactggacagaatcaaggagaaaaatcttcagatatacaaagatagaggatgacatgttggtggccaggagtgaagtcggagaggtaatggggagatgcaggccaaaagatacaaaactgcagaaaggtaggatgaagaagtccagagatctaatgtgcaatatgaggactagagttaatagcattgcattgaattcagtatttttgctcaaagagtctatcttagatgccctacacacacacacacacacacacacacacacacacacacacacacggtaactatgtgagagggtggatatgttcatttgcttgactgtaataaccattacactatgtctatgtatacgaaagcaccatgttttaccccttaaataagaggtgtcagcaaagctgtgtgtattctagaggctctgttccttgctgccacattcctttcctcacagttacatcttcccatcactcccacatcttgcttccattgtcatatgtcctacaaagacccttgtcatatattgggccctttctgacactagaccaagatgttaaatcactgtcttaaacatgctcaaacagctaaagaaaacaacagaaaaaaaactaaagaaacattggaatatgatgcattaataaaataagaacaacagcaagagaaattataaaaaataaacagaaacttaagagttaaacagtacaataattgaaaaatccactagaggtgttctccaactggtgtgagcagtcagaagagagattcagaaaactggaatatggaataattgaaattattgtgactggggaatagaaagaaaaaggaataaagaaaaacaagcagaacccgaggacattgtaggacattatcaaatggatcaacacaaacattgttagagttctagaagaagaaaagaggaagagagaaaggaacagattatttgaagacataataccccaaaaccttttgaaacttgatagaatacatgaatcctcaaatttaagattctgaagaaactcaagtttaactcaaggaaaaattcagagacccacactaagacacattataatccaactgttgaaaactaaagtcagggaaagaatcctgaaagcagcaatagagaatggattcctcacatacaagagttcttcaatgagatgatcagccaatttcttatcagaagcactggaagccagaaggcagaggagtgatatgctgaaaatgctgaaagaggaaaaacctatcaaccaagaatcttatacctgggaaaactatcctctaaacatgagggagaaattaagatattctcagatgaataaaaactaagagagttcactaccattaaaccttacctacaagagtggtttcaggtagaaataaaaggatgctacatggcaactgcaagttgtataaataaaaatgtccaggctgggcatggtagctcatgcctataatcccagcactttggaaggccagggcgggcggatcacgaggtcaggagatcaagaccatcatagccaacatggtgaaaccctgtctctactaaaaaatacaaaagttagctgagcgtggtggtgcatgcctgtaatcccagctactcaggaggctgaggcaggagaatagcttgaaccagggagtcagaggttgcagtgagccgagatcatgtagcttgaaccagggagttggaggttgcagtgagccgagatcgtgccactgcactccagcctggtgacagagtgagactctgtctaaaaaaaaaaaaaaaagtcctgctacatgtaaatttattttagttcatatttttctgatgcttcaacatcccacaatcatgctgtgagtaccctgcccaggtgaccaggtgcaccagtgtgataaggctggctcctggcacaatttccctttcttgccctcccatattgtgacctaatcccataaaaagacaccagtaaatcccatcatgctctttgcttgtaccctctaccctgactcccagtaaaggcacttgctgaggaattctttctctcttgcttccccatctgcttgattgagcctgcttcctaggagctcttctcatatggctttctacgtagcatgccctacttccctctctaggacctgtgagtaaaataaatcatattccacatgcctttccaagtgaaaatttcatgaccatcttagagtgattcataaagacccaatagcctgactttagcattttcaataccaatggcaatgagaatgggatcattctaaactggggtggaaatttcctaggagatgctctttaactattcatggcttactaatttgctactctgattggctccacaacttgagaaggctttttacactgatggctttcttttgctgtgctatgtgcagcttcatgttaccttttggagttctgccaagactctctatcctgaagtgaggatcctgtttaaatatcaataatgacatctacatttcttcaagagcacaggatgacataacattgataacaacctcttcaaaggagattcatgtgatgtgcatattaacatcacattatccagcatctctaagttgttttgaggcgccagtggcaacatattcttcttttacaaagtttatttacaaattaaaatcaataggcacccctgttagtgcctataaacaaagaaacaaaaatacctcttctctgtggagactttagcaatttctttcatgctttttggagtttctagaccattcatgatggccatacatctccccagggcctttgatgcaaaaacaatgcccctctcacccttgtgctatattccattaaaacaacaaatgcctggttacctactgggctctcccatcctggagtccagatctaggaacaatactctcctgttgcaatcatgaaccgtagattgtcccacatgcaaggctctgctcatctgaaatggggcccattggaacctaaacttccactgaaaagcaaaattaaaatttccgtcaggtgcagctgcacaccattttgtggactgttggtcttataatttgttgatgcaacaattctcaaccaaatactaacaaactgaatttaatagcatattagaaggattctacaccatgagtaagtggaatttattcctagaatacaaagatgtttcaatatacaaatgataatgtaatatatcatattacacagtgaagagaaaaagacacgattatctcatttgatgtagaaaagcatttgacaaatttgaacatctttttatgagaaaaataatcaataaaaggaatatatggacatttccacaacatgataaaatcatatactcatactacactattttatttatctacttatcatgtgtattggttattatcatttctccagtagaatataagctccaaaaggtcaaccacttttgctcttttattcaccaatgcatgccatgttctatgtcaggtcctggcacatagtagctatccaatatataggtgtgtaaggtgtgaattactcattagaacacttccctgggacactgaaatctattttaagtggactgcatctgtgatatttgctagaaactgagtttcccatgtagatgacttggtttaaaaaacattcatttgcatacacaaagaaagcagaagagcccagaaggagaaaaccacaaaccctcttcctataccacaaccccactcactcccaggagcagcagctgcaagaagtctcatggcatagcatcaaggccacaagtatttgacaagagtgacggtgaaacctgtgatctctggagtcagagtgcctgagttcgaatcatagctctaccagttaccaatgagcatccacacaactctttgtgcttctgttttcttatctgtgagcagtgggaggaggttaaggggaatatttattctgggcataacaaccatctgaggtaacagctataaggcatttccaacagtgtctagcacatggtgagtattcaaaaattgtaaattattactttttagattttctaagtcatggaggcttcaatcgacattatatgatatgcatatggatacagctattgatataaccatagatgtagataacatagacagcgctctctgttttatccctttctttcttcctcactcttacccttcatgaaagagggaactctaagacagtaatgcacagaagttctgctttaaaataaaactcattttaccaagagagaagttgcttacctattgcttatcttaacagattgggagagtttcagtggtaatatcagatggtagaaaggggaagagagtggctgggcaacagggaaaaccaaacatctcttcaacgtgcatttcatgtagactaaaatatgaatggaagagaatgtctttttaaaatcctgtgtgtttcagcatgattaagtgagatttttctcaggaatacaaggatgcttcaataaacataaatctacaaatgcaatacagtacatcagcagaatgaaggacaaaaaccataggaccatatcaacaatgacaaaaaaagcatatgacaaaatttaacattttttcattgtaaaaatgctcaaaaaattagatgtaaaatgaatgctcctcagtacaatgaaatccatataggacaaatccacagctaacatgatatccagtgaagaaaagtgaaaagctttttctctaagatcaggaacaagacaaggatatcctgtctcactaattctatgcaacatagtatcagaagtcctatccagaataattatcaagagaaagaaatgaaagtcatacaaatcagaaaggaagaatttaaattgttgctgttttcagaagacactatcttatacatagaaaatcctaaaatctctaaaaacaattagatcaaaaaagcaaataaagttgcaaaatagaaacttaacatgcaaaatcagtgcatttctatacacttatgacaaattagcttaaaaagattaatagaataatctcatttaccattgcttcaaaaaactaaaatatctaggagtaaatttaatcaagtaagtgaaagatctgccccctgaaaactatgaatcactgatgaaagaaatagaagacacacaatgacaagatatgtgtgtttagggattggagaattaatactgtttaaatatttcctgaggagatctacaaattcagttcaatcctaaaaaaattccaatgatattttccacagaaattgacagaacaatctgaaattaatattaactacagaaaaccatgaataggtgaagccatcttgagcaaaagaagaaagctggaggcaccagactgccttatttcaaaatctggtacaatgctataataatcaaaatagcatggcattggcataagaagagacacatagatcgatggtacagaatagagagtccagaaacaaacttacatatttttgcttaattgacttttgacaaaactgttagacatacaatgaggaaagaccagtcttcaaaaactggtgttggcaaaactggatgtccacatgtaaaggaataaaattggaccttcatcttatatcacataaaaaaatcaactaaaatggattaaagacataaatgtaagatccaaaactgtaaaagtactagaagaaaagtgccatgacattggtctgggcagttaattttgggatataaacccagaaggacagacaacaaaagcaaaaatagacacatgagattccaacaaactaaacactgtctacacaggcaagaaaacaatcaacagagtgaagagacaacctgtagaatgggagaatatttgcaaaccatacatctgataaaaagtcaatatataaaatatagaaggaagtcaaacaactccatagtgagaaaacaacccaaaatataaaatacaggccaaatatctgaacagacatttctcaaaagaagacattcaaatggctgtaggcatatgaaaaaaatccaacattactattctcctgagaaatgtaaattaaaaccacagtgagatatcatctcacaccagttagaatggctattataaaaacaatgatatttaactagtgttggagagtgtgtgcagagaagaaaactcttgcatactgttggtgagaatgtaaattagttcagccatgatagaaacagtatggcaattcctcaaaaattaaaatagaactactatgatccggccatctcactactgggtatacaatcaatggaaacgaagtcaacatgtcacagaaatatctgcactcccatgttcactgcagcactatttagaatagctgagatatgggatcaatctaagtgtccatcatcaacagacaaactgataaggaaaatacacaatggaattctaatcagccttaccaaagaaggaaatcctgtaatttttgacaacatacataaacttgggggactttatgctaaatgaaaaaagccaggtgcagaaagacaaataccacatgatctcactcatatgtggaatctaaaaaagttgaacacatagaaatagacagtagaatgggtgttaccaggggctagggaggaggtatggctggggagagattggtcaaaggatacaaaatttcagttagataggagaaatatgattaagcgattacctgtacaatatggagtccatatttaataacatccattatactaagagagcagattttatgagttctctccacaaaaaaagatacgtatgtaagatcatgcatatgttaattagctcaatctagtcatttcaaaatgtatacatatttcttaatatgttgtagatatgcataattttgacaaatagaaaataaaactacaattttttgttaaaaatttaatttaaaatagaaagagaaataataaaaaataaaaactcctgtgtgtgtattcttacactcgtatacacaaatgtgtatacacacactcacacatacacacattcataaacacatataaaagcatggcctatcatgctaatatacaaggttgttttgtgcattgaataaaattataacactttttttttttcgagacagtctcactgtccctctgctgcccaggctggagtgcagtggcatgatcttggcttactgtaacctccgcctcctgggttcaaacaattctcgtgcctcagcctcccaagaagctgaggttatagacatgcaccaccatgcacagctaattttttttgtatttttagtagggacagggtttttccatgttggccaggctggtcttgaactcctggcttcaagcaatccacttgcctaggcctcccaaagtgctgggattacaggcatgagccaccctgcccgacctaaattataatacattttaaaagctcagtaaaatatctggcacatagaaagcatccaacacattattaacaaaaggttggagtgcatacaacagggttttaactctggttgtctctgactggtgtgatgggtggtgattgttcctctgttttcctccctgcactttctaatttttctgcaattaacataaactggcttaaagaaggaactctggagctgctccattgactgagctaggagacaatgaacaagttcctccctctgcctgactccccttttgcaagtagaggataacaactgtagctttcacacagtgatattgtgaggattagtcacattaatacaaaatgctaagaaatgtgtctgtcttatcagaagagtttaattggtgaactattatggtagtaatttcactacagtgtatgtgtaagaaaaatacttttaaaagtgggagccctgccctttaggatctgtgaggggacatcacagcagggcccactggggagctgagaaggtactatgcccagccctgtgaccatggggtcagctccatggattgagaaaggggtgaggacaagcagcccggctctcaaaggctgcaccagttaaggccctccagtcctgcctgtcttggggaaggggaaataaaatctccacagaaaagtctagggaaccaaggcatgttatggggacctgttatgggctgaatgtgtcccccacaatgaatgtgttgaagtcccaatccctaatagctcaaaatgtgactgtatttggagataggctctttaggaagtaattcagttaaaggaggtcattgcggacaggccttaacacaatgtgaccctgtgacccatgttttcactacaggaggagctgagggtacagacgcacacagagggaagaccacgtgctaagacacagggaagagatggccttttacagccaaggagagacctcattagaaactaacccagccgggcacggtggctcatgcatgtaaccccagcatttgggaggccgaggtggacggatcatttgaggtcaggagttcgagaccagcttgatctacatagtgaaaccctatctctactaaaatacaaaaattagccgggcatagtggcgggcgcctgtaatcccagcgactcaggaggctgaggcaggagaatcgcttgaacccaggaggtggaggttgcagtgagctgagattgcgccactgcactccagcctgggtagacagagcgagactccctctcaaaacaaacaaacaaacaaacaaacaaacaaaaaccaaaaaccaaaaaaactaacccaactgacaccttgatattggacttcaggctccagaactgcgaggaagtattagccccccagtctgtggtactttgttatggaagccctaacaaatataggacccagcaagcagaagatgtggaacttcttaaaaaggaactggccacagagaaatggtggtaacactcagatcacagaggagggaggaatggggggaacacagggcaaagggaggagcacccttagggaggatggtggatgcaggacatctccaggaaacactgcacccctgcccaactcaagcaggcaccatttcagacttcacttcttcaggatggtgcacagagagggctgggcttggagccacacagccttgtcaggctgtctctgagctcactctgtgggcttccgcgggtttctttgcctctggagcctcaagagttgcaaggatttaaataatgattcttttgaatgtgttgtgtaaactgaactactataaaaatgtaagtaattgttttggtggtggttgaagcatcatgtggtttgatgcctctggtagccagctgcagatccacagaggaagtatgcacctccctgatcttctgctcttagacaatgcccagtccttgactttccttggcagcacttgtggttgtctggaatccctggaagcccaggggaaggccatggctccgtggtgaagaagaaagcattctagcccaaggcaatgctcacctgtgagtcctagcaggagagtcagcagcaggaaaggactaggagggtggggccaggaggctaggatgggtatcctggagacatcaggggcctgctctgttcaaacgtctgtgctggggagatctcaggctctgctctaagtagataagacaagcgctggctccctcgattcaagaggaagtagctgtgatgaagtgagacagtaacctgcttctagattgtgacatagaaaccaggcacagcaggcagctacaaagtagagttctcatgctccattttcaggagaatcagacacacttagcagaaataatgcttcctgcacaccttgaccatgttctctctccccacatcacccctatctccatctcagatatttttggtgattccgcaattgggggttttaggccaagaaagatctgtgattgtgagctatgccctaaactgtccatgtcaagaccgtaagatgtggctggcttgctgccttagtctgcaccagcttcaaacaaacgctactcagctggaggcaggaggaacatttacaggacttgctcagcactggagaggaaccagatctgctcctgaaatgattccttattccaaaagtttgttgatgtaactgcccaaacttagcccaaattcagtctaatctgggaccttagcattttcatgtgcctgcatccagcagaaagaatcatttcacgacttcctccaggagaggaagtgggtttagagtaataaggatctgctttaggaggtaggtggggattatggattccagagatgagacagggttatgatgggaggagaatatggtggacaggttcctggggccatcacctcaatttcagtaccttttgttcgtgaatgaaacacctatttcattcactactgtattcagataagacctgaggagggaggaagaataaatgccccaaccaagagtgtgtgctaaggagttgggcaagctactgggccctcctaggctcagtttcattaaactgtggataataagtttaggataatatctcctaaatgtggataataaggctttccctgcagatgttatggtggagactaaaagagatgttataactataccatgcctgaaacacagtcgggcattattgatactcatggtgccatgtaaacagagggaactcaggtattgcttttgaatggatccttactgcctggcaagttgcagggacttcctcctatctaactccctggtcctcctgggacccagcttacatgaagcacttggactacccctgccatcctgatatcaatggctccctctgggattttcttcatcctgctccctgtcaatccatacattaatccctccacttataatttccaactgtgtggctttcaacaagacactttacttctctgagccttagtttgattgtacgtaaatggaggttataacgtgcaccttgtagagatacggtagaataatataagctatacaaaatgctagacttctacttaattatagccaaaaaactgtggcaacaatttttttgtgtagaagaagcattcactgcttccctgccacagctgtactttagaaaaaccactttattgggagaaatggtttctcttccatcatctatgactaacaaagccctgtccaaaaacatttctgttgcattctgggttttagattcttcatctgtcatgagaaattgtcaaataaaattgtaaaatttatcatattttcattcaaatgtttcaatgtggcagatatgcacatggtgaaatcttcccctgtctgtgattccacactcacagaaaggaaaatgaaaaattatataattatattaatcaatgtctaattacacttatgaacaagaaatgagtctccacataacatgaaggaagagtggccgcatcatttattgaagatgtgttatgctccagatactgcatcaaacatggtatgtcagatctcattaaatcattactccaaccccatgaggtaagtgctaccattaacctccttttacaggtgaggacacctgaggcggatagagagtaatgaatttgctcaagatcacccagctttcagaattagaacatagactgtcacactccacagccttcacttttaatgtttgctctatgacagttctcatagggagggagagtctgttagtctgttctcatactgctataaggacaaacttgagactgggtaatttataaaggaaagaggtttaattgactcacagttctgcagggctggggaggcctcaggaaacttacagtcatggtagaaggggaagcaaacacattgctcttcacatggtggtgcaagaagtgctgagcaaagggagaaaagccccttataaaaccatcagatctcatgagaactcgctcactgtcatgagaacagcatggggtaacagcctccacgattcaattacctctcaccaggtccctcccataacacggagggattatggaaactacaacacaagatgagatttgggtggggacacgggcaaaccgtaccagagagacatctttcaggaagtaagcagagaagaagccatagcctcaattagaagcagccaccacagggaggttggggcaggtgccacgcttcatgagaccctgacaacccctaatcacttggggcgttattcctggaaagatagcagtgcatgcaggaatctccaaagatttggagaacagcagcaccatgagagctagctaaccaatccaagaacaacaataactaaaagcaaaaacagcaataaagagaacttctccacagagaaaacattaaaaaaagtcaatgtgaaaaggtctttaaaattagtatattcaataaccttataaagaaaaccgaagtaaatccataaaacatcaggtatttatgaaacaagaataggcaggcatgaaataacaacaggcatctaaggaaaataccaaaacacagactggaaatgaaaacataattagtgctgaattttttaaattaataggtttagtagctgagatatataaataagtagtaagttggtgagctgggtgatcatgtcagggaaatctccaagcatccagcacaaagagacacacccaaacaaagtaatataaataggtacaaatataggaatagcaaaagatataccacaaaagcttttcaagatggcagattagacgcattgctagcatacttctcccacttggaaggaaaaaatagtgtgtagagagtcacactgagaacttatttccaagaagcgacacagaaactgaataggaaaaccgaaggaatcgacagaccttttgaaggaagcaggaggctgccgcctacactgtgagtcaggcaagggctgcgagtccccagagtgagaggaagggagagactgccttggggatagacacccccaccagggaccctgaaagtccaggcaatgggggaaggctctaactccaaccagcgcaggaaccgacttggggaggcctgtggaatataaaagtaggagcaacggcgggaagacccgtgaatgcacttccagatcctcgtgtggaccgatggaagccattccctactgttccacacaggggactctccggaggacagccgaaaagttcaagcagttggtctcaggttgaaggaagcccccaagggggtttcacaatagaaccttgggtggggatgaactcccttggccaggaccagggcaggggagagtgaaaagtgggctgcaaccgcaagtgcaggagccaggcaccaggctttccagtggatggggagaggcgtggtctgaaagcggctgttattttcacatgggcaactggagttctgagtgcaggctgactggaacttagctcactgctgccagtgtaacactgtgggagtggatctgcctcgccaagtacgtgggaactgtgtgggggcttaccgctgcctgctactcaccattccatgtgcgaacccttctgtgcagcacaggcagcaatactcccctccggaaggtcaacccagtgacctgagacctgctcccatccccacaacacccacaggggctgctgtgtaccctgccagcaaagactcagagggcaaacccgcctgacccagctcccatctggctttgctctgccacttgccctggtagcttcacataaaggacagaaaatcttgagaactatatgcctctcctcattgcctgagaaaccagagtacccgcactgggcaacataaggcaagcaaaaatcctactgctactacagcggctggtgctcttttgcaagcgtcacctcctggctggaagccaaccaacacagtccatgatagcatctcctggtggaatagcactgcgcccaagaaggagaagacagctgtgaaatctccgttatcactactgcctgcaccactctggctaaccaggaggtcctgagcctgtccatatgattagatcattccactctaactggtattcaagaaagtgagtacactaaggctatcaataaacaaggaatctcacagagtctacatcactcacctgctaccaccattagagctagtgctgctacccactgctgggagacttgaggacaggttgtatcaccagatcccttgcagacactccccaacatgagcctggagtgtggcaacttcactggatggctagacccagaggaacaataacacttacagtagcctggctcccagggatccccactcttaggagaagggggagtgcaccacaccaagggaacatcctgtgagacaaaggaatccagacaacaggacttgagcatcagatatttccactggtgggaagttaacagaggcacaattgtagtgctggcctcagcagggaaaatcttcagctctagcccaacagtcagacagccttggtgcccatgaagggctttggataaggaaatatcttttctcccttgtccaccaccacaggcatggttagggcttttcccatgggagttaagtgtgggttaaactatagacgccctttctggaacacgtcagggtgatggcatccccacaggaggagcatcctccaggtgccggcttgcatgagagacagagtcacaattcctctctacttgaacatcaacattcctacccatgaagaggtgcctgtctgatctgaatgctggagtactaggactggagtgtgtctgagaggtgaataaatttcctgctgacctggcaggggagctaaggtggcttcaacccttccttctgataagacctcagtgcaactcactgagagctcctccaagaacctctgtcaaaactgggacctctgcccaccattgggtatcgcatttgcccatctgctgtagccacaactagtccctacccagggacacctcccctattggcccctactacaactagcatgtgggaaagccattatacaaagactttataaccagggaactcttacagtcttcatccctggaagcaccaagaaccaaattaggctgtaactaactataagtattaaagtctcatccttaaggggaaaaagaaattaaaacaaacaacaaacttagtcaaatcaaacataaattcaagaatagttagaagaaatagcctacccaaataagaaggaaccagaatataaactctggtaatatgacaaaatatggttctataatacccccaaaggatcacactagctctacagcaatggatgcaaaccaagatgaaatatttgaaaataccagataaggacttattaagctactcaaggagatatcagagaaaggtgaaaaccatcataaaaaatttttctaagtttaggatatgaatgaaaaattttctagacagatagatatcatcaagaaaaaccaatttgaatttctggaaatgaaagacacacttagggaattacaaaatgcagtagaaacttttaataatacactaaaacaagtagaagaaagaatttcagagcttggagacaaggcttttgaattaattctattaggcaaaaatttttttaaaaagggtcaaaagaaatgaacaaagtctccaagaaatacaggattatgtaaaatggccaaatctaagaataattgatgttcctagggagaaaagaaaataacaaatctggaaaagatatttgagggaataattgaggaaaatatccctggcctggctagagatctagatatccaaatccaagaagctcaaagaacttctgggaaattcattgcaaaaacatcttcaccaaggcatatagtcatcaggctatctaaagccaacatgaaggaaagaattctaagagcagtaagacaaaagtatcaggaaacctacaaaggaaaacctatcaaactaacagcagacttctcagcagacaccttacaagctagaagggattggggtcctctcttcaatctccttaaacagaacaattttcagccaagaattttgtaccctgcaaaactaagtttaataaataaagaagaaataaagtaattttcagacaaacaaatgttcagggaatttgttactaccataccagcactacaataaatgctaaaaggtgttctaaaccttgaaacaaaaacccaatatgcaccaaaatagaatctcttggaagcctaaaactcacagggcctacaaaacaataacacaatgaaaaaaaaattatctaggtaacatttaacatgatgaagagaacagtacctcacttctcaatattaatgttgaatgtaaatggcctaagtgctccacttaaaagatacagaatggcaaaatggataaaaaatcacaatccaaatatctactgtcttcctgagactcacctaacatagagggattcatataaactcaaggtaacatggtggaaaaagatattccacacaaatggaagccaaaagcaagcaggagtagcttttcttatatcagacaaaacagacttcaaagcaacaacagtataaaaggacaaagatggtcactatataattataaaaggatcaatccaacaagaagatattacaatcctaaatttataagcacctaacactagatctcccagattcataaaaccactactaatagatctaagaaatgagacagacagcaacacagtaatagtagaagactttaatataccactgacagcactgggcagatcatcaagacagaaagtcaacagagaaataatggacttaaattacaccctagaacgaatggacttaacagatatttacagaacattctacccccaaactacagaatatacattcttctcatcagcacaaaatagaccatatgctaggtcacaaaacaagtctcaataaatttttaaaaatcaaaatcatatcaagtatcatctcagactacagtggaataaaactagaaattaactccaaaagaagccctccaaactatacaaatacacagaaattaaataatccactcctgaatgataactcggttaatgatgaaatcaagatggaaattaaaaaattatttgaattgaatgataataatgacacaagttatcgaaacctctgggaaacagcaaaagcagtgttaaaaggaaagtttacagcactaaatgcctacatcaaaaagtctgacagagcacaaattgacaacctaatatcatgctccaaggaactaaagaaacaagaccaaactaaacccaaagctagaagaaggaaagaaataacaaagctcagagcagaactaaatgaaattcaaacaacaacaacaaaatacaaaagatcaataaaacaagaagctggttctttgaaaaactaaacaaaatagatagaccattagctggattaaccaagaagagaaaagatgcaaataagaccaattagaaatgaaactggagccattactactgacaccacagaaatacaaaagatcatttgagactactatgaacacctttatgcacataaactagaaaacctagaggaaatggatgaattcctggaaacatacaaccctcctatattaaatccagaagaaatagaaactctgaacagaccgataacaagtagcgagattgaatcggtaatcaaaaaaatggcaaacaaaaaaaaaggtccaggaccagatggattcacaactgaattctatcagacatccaaagaagaattgatatcaatcctgctgaaactatttcaaaagatagagaaagaaggaatcctccctaaatcattctatgaagccagtatcaccctattatcaaaaccagaaaaggacataacaaaaaaaagaaaactacagaccaatttccctgatgaacatagatgcaaaaatccttaacaaaatactagctaaccaaattcaacagcacaacaaaaagatagttcatcatgatcaagtggacttcaacccagggatgcagggatggtttaacatacacaagtcaataaatgtgatacatcacataaacagaattaaaaacaaaagccatatgatcatctctatagatgcagaaaaaggattcaacaaaatccagcattcctttatgataaaaactctcctctcaaaaaactaggcatagaagagtcctacctcaaaaaaataaaagccatagatgagaaacctatgccaatatcctactgaatgggaaaaagttgaaagcattcccccaagaacaagaataaggcagggatgcccactttcactacttctattcaacatagttctggatatcctagccagagaaattaggcaagagaaagaagtaaagagcattcaaatgggaaaagaggaagtcaaactattgctctttgcagatgatatgattatatacctagaaaatcctaaagactcctccaaaagactcctagatttgataaatgaatttgataaagtctcaggttacaaaatcaacgtacacaactcagcagcactgctgcacaccaacaaccaccaaactgagaatcaaatgaagaactcagtcccaaacaactgcaaaataaaatacctaggaaaacaaacaacagttgtaaaataaataaaatacataggaatatacttaaccaagaaagtgaaaaatctctacaacaagaactccaaaacactgctaaaagatatcataggtgacacaaacaaatggaaacacatcccatgctcatggattggaagaatcaatattaaggaaatgagcataatgcccaaagcaatctacaaattcaatgcaattcccataaaaatgctaggagcatttttcacagaattagaaaaaacaatcctaaaattcatatggaacaaaaaaaaagagcctgcatagccaaagcaatactaagcaaaaagaacagacctgaaggcatcacattaccagacttcaaattatactacaaggctatagttaccaaaatagcatggtactagtataaaagtaggcacatagaccaatggaacagaataaagaaccaagaaatagagcccaatatgtgcagccaattgatcttcaacaaaacatgcaaaaatataagttggggaatggacaccctatttaataagtggtgccgggaaaactggcaagctacatgtagaagaatgaaactggattctcatctctcacttcatacaaaaatcaattcaagatgaatcaacgacttaaatataaacctagaactataaaaattctggaagacaaggttggaaaaactcttctaggcatcagcctcagcaaagaattcatgactaagccccaaaagcaaatgcaacaaaaacaaaaatgaataaatgggacctaattaaactaaaaagcttctgaacagcaaaataaataatcagcagagtaaacaaacaacacatacagttggagaagatattcccaagtcaagttacaattgactggtaaggataccgaggcccacgatggtggagtgccttgtcccagatcacagagctgggaaatgtcagagctgagatgtggcacaggtgatggggctccaacccatgctctcctaaccactgtgctactgacactcagtaataaccctaacaccatcaccatccagaactctgtgcacatcctctccaatccccacagagtccataatggtgaccatgatcatcaccatttcacaaatgggaaaactgaggactcgagggtagccaagactttaccaagatcacacaaccttgggaaaacaaccccatcatttactggtctattctctccccagattagctgtatcctcttaacatcctggaatgattggtgtaattatctacaccctacatatgaagaaacaggctcagcaaagggaactgggttgcctgagatcacacagccttgaaataacacgtgatttgggagagtgcctacaatgtgttaggtgatttacagagagaatcttaagtcctttccactctcctaaaggagtccaagattgtcatgattttacagatgagaaaactgagactaagagagatgaaggcactgtcttcttatcccccgtgcatgacttgggcatttcctgtgttttgccaagcttccctgttcatcaaagagtaagcactagaacttcaacatccccaacaatgactgccacctcccttgtccctttcagattcttgacttaatgcaattctagggagaagtctcccttctgggtgcccagggctggttactctgtagttctccccttgggctccctatggttactctgtacccataaacagaagaccttgggttcctaatagcccaaaaaagaatgtaaactcttgctcacacggggcatgagaactctaggaaatgtctcattcccacatccttagtcttcggcaccatgagtgggtgggcacgttgtaatggcccaagtggctcaccttgcccattgcctagacagagtcgatttatgaagacaggggaattgcttgaaagagtaattcacacaattctggctttgcgggagaccagagatttattattactcaaatcagtctctccgagcatttggggagcagagtttttaagggtaagttggtgggtaaggagaagccagtgagccaggagttctgattggtcagggatgaaaccatagggagtcgaagctgtcttcctgagctgagtcagttcctgggcaggtggccataagagcagaggagccagtttttggatctgggtggtgccggatgatacatcaagttcagagtctgccaaatatctcaagcactgatcttaggagcagtttagggagggtcagaatcttgtagcctccagctgcatgactcctaaaccataatttctcatcttgtggctaatgttagtcctacaaaggcattctagtctccaggcaagaaggtctgctttgggaaagggctgttaccatctttgtttaaactataaactaagtttctcccaaagttagttcagcctacgtccaggaatgaacgaggacagcttggaggttagaagcaagatggagtcagttaagttagatctctttcactgtctctcataattttgcaaaggtggtttcagtgtggtctgctgaaaggcaggaggctggactcagctccatggatgctgctcgatgaaggagaaatggcacatgtaagaagagtcctaaatgccaagacatatcttttaggacaggttcaacataacatataatgcctgcaggaactttctgatgggggttgtcaagccagcccctcctacccacacaagaagaagccttttttttctttttttttttaatgtttagtgatatagaacagaacaatacaacagtttagaacgagaaggttgaagcatttccctacacttcagcaagcacagctgggtgttgcggagacaagggctgtgtgtcaggcagctgggggtcaaaacttggctcctctgcctgctcacaagtcaggtcccctctctaaacctgtgtcctcatctataaatgaggcagcaaatggtctccctctcatagcactggttataaggagaaaatgccagatgaagacacagcatctgggacagctgccactctttggtcccctcctcacttttctccaatctaatccagggcatcgtttaggttaatggcttggaaaacaggaatgaacactctactaggagtcagcacatctgagttactcctgagccttaataagggtgcttgcctaggcacaatatgaaccatcgtggaatttcaatgtctttgtaatatctgcaaaatcagggtaaaaccaccttccctacctatgttcaagggatgcagggtggtggtggggggtgctgattatttcaacatcaagaagaaaacattagcaatagctacataccttaaaacacacacaccctgtgacccggcaatgtcacttccagtgggtgtcttccacctgagcaggatgacgcatgtacatatacaaggccacccactgcagcgttgttttagtagcccaaggttgggaacaacttacatatccattaacagaagactgtaaactaagtttgatagctccataagttggagtactctacaggtattaattgagcagctgtctatgtcctgatatagaatctttatataaaatgaaacgggtcacatgtggtgcctcatgcctgtaatcccagcactttggaagaccgaggtgggtggatcacctgaggtcaggagttcgtgaccagcctggccaacatggtgaaaccttttctctactaaaaatacaaaaattagcctggcacagtggcaggcacctgtagtcccagctactcaggaggctgaggcaggagaatcacttgaatctgggaggtagaggtctcagtgagccgaaatgttgccactgcactgcagcctatgtgacagagggagactccatctcaaaattaaaataaaataaaataaaataaaataaaatacttactgttttccagtcaggctcgaggtctgaatgtcaggggtgttctgaaccttgggaaggtggtgaaaaggggaagtgctggctgcctctcagtggttatgttcaaggaacatctattcagcacctaggatgtaccaggctcttctgtggagacggtgtctaacaccagggcaagaaggacctgcctggaatcggatctgagctctaatttggatcccatcactaactggccctgtgactgtgggcaagacccatgtcatttcctggcctcaggctcttgtttgtcaacagggggttggactggctggtctgaagatccctcctgtgctaacatcccaggatcaggagttagattgtgaatctagatctttggcaggaaacccaaagtgagcgtctttgctaactctactgggaaacctctaagtcactcacatgggaggcctcttccctggagagagggatattctgagatgaaccacctctgactgcagcctacagtacctgtgtaagtcaatccctgaatcacacaagagtttctctaacagatccacaaacaccaaagctcacggcatctatgcccagcagggccatcagattaaacaatggatctgtgcctctcagaaatcttcccaatgtgatgttttttgaagattaaactaagaaaaacacaatccccctcccaccccgaacaaattccttctcattggaaggaaagagagggtaaggtttgtgagagacaagtttttccctgttttgttcattgcagcttacacagcaaccagggcagagcctggcacatagtaggttttcagtgagtaccagttatataaaaaggagactcggccacccagagggggaaaatgctctgtggaggcagaaggcaagatctggccttgtgcctgggcaagtcacccaatctttcagttccctcatctgcagaaaccaaaggctgggccagatgagaagagacaagttgtggagaaggcagaccagtgttacagactttacccaccatttacaggccatgggtgcctgagtgaatagcatgatgcatcaggccttaacttaactgatctgtagaagggggtgacaccagttcatgaaaatgcgtacccaccaccacacccgattgttgctcaatgaatggaaggtgttactattgacttattgtcacacactgggggacgaaggaggcccacactgtactcactatgcacagacaactcagtgcctggtccagatttaagctccatgtcagggccccctttccagaacttcacacagttgtaggtgccagtgttggctcttgtgatgctagtgatgcacatggaaaagtctgtattgtttctctttgtgatgtctgaaatgcaagctatcttgggaaagtggcctccttttgaactgtagattagttcctgccctgtttcagttcctttgaaccacctgatgggccccaagggcaaagggaggtcacagagtggtcaaacctccagctgtgactgacactgacttctcaggctgaatcacccgcagctcctcctcacctgccgctcctggaggaaaacacaaaacagtcatttaatcatccttatgtgatgcttatgttttctaaagtgtttatcaatgactttcattgactgagtatacaccaggagtgggccttgagctcagcacactgcatgtattatctcatttaaccctcacaacaagcctgtaccatgagactgtattacaagtgagaacactgtggcagagtcaggtccagtttaatggtagagcatgaggttgaggacctgagtagaactcctgaaccctcctttgaaatatcatgctttgccaaatatttgtctctctactttctggccacatggagtgttgctttttctgaatcattgcattgggtggcgccatgtgacttctttagaccactgagttgcgagcagaagtgatgggtataatttgtggtctgtgcatttaatggcaaaagcctctgtggatcaactgctcccttccacaaagacccacaaggctctgatggaagctacttcctcactttggatttctgagtgactataaaatacataactctcaacgcacaatgaacatatggcttaaataagaaataaaacattttttaagccctgaaattttttagccatagcataatcacattacattagattcctaacgatgctctgacaaattactactaaatgtatgtactacaacaatagaaatgtattatcgtacacttccggtggtcacaagtacaaaattggaattgttgagctgtaaccaagaaaaaagaaaagaactcaaatatgcaaaggtggagaataaaactttggtttcctggagtagggttggggaaggttatggggagatgtatgtcgaaagatacaaaattgcagatcgttaggatgaaaaactctacagatgtcatgtacagcatgaagaccctagttaataatattgaattattctcacaatttttactaaaaggtaagattttagatgcacttggcatacacacaaaacaaggtagctatttgagatgatggttatattcatttgcttgactgtaacaatatctatctacctatatatatctcaaagcacttttaaatatatacaatctaagcaggtatcagcagagataatatttttaggcttctgtctcttacctgtccagttctagaggttgttcacattccttttttcacagtttcatcttactatcactccaacctcttgctttcattatcacatgtccttctttaattcttactctcctgcctcctacttataagaactcttgcaatatattggtcccatcctgatactagaccaagactttaaaacaactgtcttaaaatgctcaaagagagccaggtgcggtggctcatgcctgtaatcccagcactttgggaggctgaggtgggtggatcacctgaggtcaggagttcaagaccagcctggccaatgtagtgaaaccccatctctactaaaaacacaaaaaattagctgggcgttgtggcaggcacctgtaatgccagctactagagaggctgaggcaggagaatcacttgaactggggaggcagaggttgcagtgagccaagatcacaccattgcactccagcctgtgcaacaagggcaaaattccatttcaaaaatgctcaaatagctaaaggaaaacgtggacaaaaatctaaaggaaattaggaaaagatgtattaacaaaatgagaacatcaactaagagataaaaaatattaaaatagaaccaaacagaaatagaagagctgaaagtcatgataatgcaacattcgctagaggagtttcataatagattttagcaggaggaagaaagaatcagaaaacttgaaatgaaattattgagtctccaggatagaaagacaaaaaagaataaagaaaaaggaacagaacctgaaggacttatgggataccactaagtggatgaacatacacattatgagaataacagaagaggaagagaaacagagaggaaggagaagatggttatttgaagaaataatatcccaagtcctcccaaagttgattaaatatgtgaatctacaaatataagttgctgaacaaatgccaggtaagataaactcagagacccacactaagatatattataatccaactattgaaagctaaaatgaaacaaagaatcttgaaagcagcaagagagaagccattcctcacatacaagagatcctcagtaagattgttggctgagttcttatcagaagcattggaggccagaggcagtgggatgttatgtttaaagttctgaaagaaaagaaaagccatcaactaagacttctatacctgataagaccatcattcaaaaatatgggataaatcgagatattcctggatacacaaaagctgacagagttcatctcctctagacctgtcctacaagaaatcttaaagggagttctttaggttgaaatgaaaggatgcaacataatacctcaaaattgtctgaagaaataaatattttctgttgtggtttaaaattttagaacttcatatttttctcatgccttgatgtccccacaaacaggctgtgagcaccctgcccacgcaatgaggtgccaatatgataaggctggtccctgataccagttcttgccctcccctactgtaacctagtgatattcaaacacaccagtgaaattccctcatgccatttgcttgtgtactttactgtgactctaataaaggcattttcccaggggtccacccggtctcatctccccacctgctaacttgagccctttctctaggagctccttctaacgggctccctgtgtggcatgtcatgcttcaccttttaggaactatgagtaaaacaaatcatttaattttatatgtctcttcaagtatgacttctgcaactgtgttggaatgatccccaaagatcccaccaatgacacttactccaccatttacaacacaactggtgatgagaatggatcatttaaaatgggtagaaagttcccaggggatgttttttaactgctcatggctcactaatttgctatcctgattggctccaccaatagagacgactttatatcctgctggcaaggtgtgcaccactttgtgtttctgccaggactttccatcctatagtgtggatcctgtcccaatctcaataatatggcccaggataccacttcctatccatgattccagcaagagggggatacttaaactatcattgccagggatctgaagttactgggctatgtggattggctatttctcagtgtacttcggagtgattttgatttgaagaagaactcctgctgatagaatggagatctcctttggtgctgagtgcatatcactctgttccagcctcagcaataaagacaagttgaggagtccagtgggctacagcttgggtgggtggctctctccccactgttcaatgtgttgttgaattacaacaacacagatgcttctcagcttgtggtgaggttatgtcccagtaaacccatcctaacttgaaaatgttgtaagtcaaaaatgcatttaacatacctaacctactgaacatcatagcttagactagcctgccttaaacatgctcaaaacttaaattggcctagagttgggcaaaatcatctacacaaagactacttgataagaatgtattggatatctcctgtaatttattgaataccgtactgaaagtaaaagaatggttgtatgggtactggaagcatggtttttgctgaatgtatcacttgcacaccatcagaaagtaaaaacttagaaatcgagccattgtaagtcagggaccatttgtaatttcctctcttctctcttggtgtcaggcagccctcctttctcagagagtcctccacggcacctcgtagagctctgtgcctccagggctgctgagagcttctctgttgcctcccttgctgctgttgctttcatatcccaactccattggatatctcagatctcatccacggagataggtggctcaatgtttttaaaaagcagagcaaagtgggaaggggcactttgatcccactccccctaagacgcttgaggtttcttagatcattcgagattataaatcaggacgggaagccactcaggactaccaggggcttgtcaggtaaatatccaaagagagaggggaaacctgtatccactcataaatgcgagtcattctaaaatattttgcatcctgggcaacatggcaaaactctgtctctacaaaaaaaaaattatgcaaaaaattagccaggcatggtagagcatgcctatagtcctagctacttagggggctgagatgggaggatcaccagagcctgggaggaggaggctgcagtaagccaggatcataccactgcactccagcctgggtgacagagtgagaccctatgtcaaagtaaataaataaataaaatatttgctgaagagaaaagaagagggagggggatggactgattatattggagtcatcagggccatcccagagagaggctactgcctagaggtgctatcctttttctccttttcctcttactaaccagagacaaaactaaaggcatagcttccagaggcaataatcccaaaataggaaaaaaaaaaaaaaaaaaaaagaaaagaaaaaagaggaaaggagagatttgctgatttaggcacccacaaagccaagatggaaatgaaaatgtacattaacacttatgtactgagcaagtgttaggtttagaaagtgtcacacacgtccctgtgaagagaccaccaaacaggctttgtgtgagcagtaaagtcttttaatcacctgggtgcaggcaggctgagtccaaaaagagtcagtgaagggagataggggtggcactgttttataggatttgggtgggtagtggataattactgtcaaagggggtttttctcttgcaggcaggggcggaggtcactgtgggggagcttctgagccaggagaaggaatttcacaaggttaaatgctcagttaaggtggagcaggaacaaatcacaatggcggaatgtcatcagttaaggcaggaaccggccattttcacttcttttgtgattcttaggccatctggatgtattcatgcaggtcacaggggatatgatggctgagcttgggctcagaggcctgacattcttgtcttcttatatcaataggaaaaataacataaaatagtattgaagttttggggcagcaaacatttttagggggtggtacggagagataatggacgatgtttctcagggctgcttcgagcgggattaggggcagcatgggaacctagagtgggagagattgagctgaaggaagattttgtggtaaggggtgatatggtggggttgttagaagaaacatttgttgtatggaatgattggtgatggcctggatacagttttgaatgaattgaaaaactaaacggaagacacgaggtctgaataagagaaggagaaaaacaggtattaaaggactaagaattgggggacccaggacatctacaattcaagagtgcccaagggggttcagtgtaattacttgcttggttggtgagttttttgggctctattcttgagtttttttatgttgtcatacaccaggccagattgatttaggtaaaaacagttttcatttaaaaatatacagagtcctctttttttagcagtgagttaagtcgaggcctcggcaattttggaggaaagagaaatgcaaagccagcaatcgtttgttaaagaaggattagaaacagctaggagagagtgagcgagattgatagtgtggtggagatagctggggagaggtagagggtggcataagaatggaaacaagagtaagagtgagtataaaagtaaagaataagacttcatcagggtgaaagtattggagtgtaccctgtcagcaaagatcatttatccactttaagagagacttaaggtggtagtttgagataaaaccaggagccgctgaatattaagagcctgagaactgcttgggtgatttgactaataaaaggccggttcattatcagactgtttagaggtgggaaggccaaaccgaggaattatgtctgacggtagggaagaaatgactgcggtggccttctgagaccttgtgggaaaggcctctacccacccagtgaaagtgtctacccagaccaaaaggtattttagtttcctgacttggggcatgtgagtaaagtcaattttccagtcctgggcaggggcaaatccccaagcttgatgtgtagggaagggagggagcctgaacaatccatgaggactagtagaatagccaatggaacgctgagaagtgatttccttgaggatagatttccacaatggaaaggaaataagaggttctaagaggtgggatagcagcttgcaacctacaaggaagacgttatgaaatgacgacagaatagaatcggcctgtgaggctgaaaggagatatttcccttggtctaagaacaatttgccttgtgtgggaagagattgataggtggaagtttcagtggcggagtaggtgggagttactgatgaggagaaaaactggctgtgaaggactgaagttggaacactagctgcttctttagctaccttatcggcataagtgttgccctgagtgatgggatctgatgccttttgatggcctttgcagtgaatgactccagcttcctttggaagtaaagtggtcttgagaagagtttttattaaagaggcattaatgatggaggacccttacgtagtgaggaaacctctttctgcccatataatagcatggtggtgcaggatatggaaggcatatttagagtcagtataaacattgacatgtactccttttgcaagagtgagggcctgagttaaggcaatgagtttggcttgctgagaggtagtggagggggcagagcaggagcctcaatgatagatgtggaagatactatagcaaagcctgcctttgctggtgagtggcgattaggcctggtggaactgacatcaataaaccaagtgtgatcagggtgaagaacaggaaagaagaaaatatagagaaatggagtaaatgtcaggtggatcagagagatacagtcatgggggtcaggtgtggtatctggaataatgtgggagccagtctaaaacagtgaggtcaagtagtttggataggaaggctacagggcgtggtcctggctcttgtgtaagaatttcaaccgcacagccctgtacttcggctgtgtgtaatgaaaagggttgggatgagttaaggagagctagtgtgagagcagcttctagggctgtttttaaggaacggaaagatgagtggtgaaaggatttaggatctatggggtcagctaggtttgtttttgtgagtttgtataatggtttagtcaggatggtaaaactaggtatccaaaggtgaaactatccaaccatgcccaggaaggaaaggagttgttgttttgtagaaggggttggggtttgaaagtttagctggacatgctcagcagggagagcatgtgtgttttcatgaagaattatgctgagataggtaatggatgaggaagaaatttggacttgactgaagtaatgggggctgtccatgaagccttgcagtagtatagcccaggtaatttgctgagcctgatgagtgtcagggtcaatccaagtgaaagtgaagagaggctgggctgaaaggtacaaaggaatagtaaagaaagcatgttggagatccagaacagaataatgggttgcggagggatgtattgaggataggagagtatctgagtttggcaccacggggtggataggcaagacaatttggttgataaggtgcagatcctgaactaacctgtaagacttgtccagtttttggacagttaaatgagggaatagtaaggggagtttataggctttaaaaggccatgctgtaacaggaaagtgataccagggtttaatccttttaaagcatgctgtgggatgggatactggcattgatcaggtaagggtgattaggttttaatgggatggtaaggggtgcatgatcggtcaccaaagagggagtagaggtgtcccaaaatggtggattaagatggggagatacaaggggaggatgtgaaggaggctttgaactggggaaaagggcggcaatgaggtgtggctgtagcctaggaatagtcagggaaggagataatttagttaaaatgtctcaacctaataagggagctgggcaggtagggataacttaaaagaagtgcataaaaactgttcttcaagttggcatcagagttggggagttttaaagaggtttagaagcctggccgtcaatacccacaacagttatggaggcaagggaaacaggcccttgaaaataaggtactgtggagtgggtagcctccgtattgattaagaaggggacggacttaccctccactgtaagagttacccaaagcatctgtgatggtccaggaggcttccgaggtgattgggcaatgtcagtcttcagtcactaagccaagaagatctgggaaggagtcagtcagagagccttgggccagagttccaggggctctgggagtggctgcctggtgagttggacagtccgatttccagtgaagtcccacacagatggggcacagcttaggaggaatcctgggctgcaggcattccttggcccagtggccagatttctggcacttaaagcaagatcctgggggaggaggtcctgaaggaatgcctgaccactgtggatttaggtgttttgaagttcttgtgtattggagatgtggctggggtttctctcacagtggaggcaagtaattgcaactcttttctattattgtacaccttgaaggcgaggttaattaattccttttgtggggtttgagggccggattctaatttttgaagttttttttaatgtcaggagctgactgggtgataaaatgcatattgagaataagacggccttctgacctttcagggtctagcgttgtaaagcatctcacggttgctgccaaaccagccatgaactgggcggggttttcatgtttactttgggtagtttctttaagctttgttctttaacagttctttaacagctttgtaagctgcctttttacacccttcaactaggcaggaaattatataatcttgcctagctatacctggggaatctgcctgatagttccattggggatcctctcggggaactgctctaatgccttcctggaggtctggctcttgaagccggcagttatcagcgtgagattgggctggagaaaaaactctttcccattcatctggggatagggtagaagttaggatgacatttcagtcactccaggttaaattgtaggacagagttagatattggaattcctgtatatatttagtggggtctgatgagaaagagcctaaacactggctgatctgagagaggtctgatagagaaaaaggcacatgtaccctgactatgccttcagttccagccaccgctctaagaggaaattgttgggcaggtgggggagggctagtctcagaatgaaactgtaagctgaaccaggtgtgcacaggggaggtgatagaaggattatagggtggaggagcagaggccaaggaagaatcggagcctgatttagcttggcggggagcgacctgaagaggagcagtctggggaggaggggagaggtcacatgggtcagtaggaaaggaagattgaaaagactcagcgatgcttggggttgggactgagggaacaggtgggggggaaagaaggaggatttggggtgagtcacattgggaacagagactagggagggaccgatgtgtaaaagaatgcctggatgtcaggcacctcagaccatttgcccattttatgacaagaattatctagatcttgtaggatggagaaattgaaagtgccgttttctggctatttggaaccatcgtcgagtttgttttggagtcaaacagcattgcagaagaaaataaggtgtttaggttttaggtcaggtgtgagctgaagaggttttaagtctttgagaacacaggctaagggagaagagggaggaatggagggtggatggttgcccatagtgaaggaggcaagcccagagaaaagagagggtagagacatggagagaaggggtggggggtatttgtgccccagcaaagtggtacttgccactaaggtgaaggatcaaggcaggcgtccctgcggtgatcagacacctctgaaacgtgggtgaataatcaggcaggcatcccgcagtgattaaacaccaagggaagactgtcttcccgagcctgtgactggtgccggagttttgggttcatggataaaacgcatctcctctgtctctaccagaaaaggaaaggaactgaaattaagggaagagagagattgaagggtggcgccaagattgaaaggagaaagaggttaagggatagtgagagaggttggagaagagagtaaaaagaggccactcacccgatttaaaattggtgagatgttccttgggctgcttggtctgaggacccgaggtcataggtggatctttctcacagagcaaagagcaggaggacaggggattgatctcccaagggaggtcccccgatcagagtcatggcaccaaatgtcacgtgcatccatgtgaagagaccactaaacagtctttgtgtgagcaataaagctttttaatcacctgggtgcaggcaggctgagtctgaaaagagagtcagcaaagggagataggggtgaggccatttcataggatttgggtgggtagtggaaaattacagtcaaagggtgtttttctcttgtgggcaggggtgggggtcacaaggtgctcagtgcgggagcttctgaggcaggagaaggaatttcacaaggttaatcacccagttaaggtggggcaggaataaatcacaatggtggagtgtcatcaattaaggcaggcaccggccattttcacttcttttgtgattcttcacttgcttcaggccatctggatgtattcatgcaggtcacaggggatatgatggctgagcttgggctggaggcctgacagaaagcataatgctacccttagattacataatgatttaaaaacaatacacagcaggaaaaagtaaagggtaattaaataaattctgggtacatccgtattttaatataaattgcacaaaaaccttttaatctgaggaatgcaatgcccctttcaattatcaggcccagagaggcactggaatgagaaagcagtcatgtcccacttccctccttcagctaagtaaccatctcttgaggctgcttgccatgtggactctagactgactgatgccccaggtagatacaatttaatgtaacaatgccatatgtggacactataagtcatattctatagttaaataacgtataaaggttactaatcaatgttatttttgtaaagcaatgagaattcctgacaaaaacttttgtaatcatcccctcccctggtttgtcctttttccttaaaagctcgagtctgttctttattctccaaagtgacttggaggtgtttcctgggttacagtcttcaaatttggcccaaatagaccttctacttatattaattttatctaagcttcttctcttaggtagacatgtccgctgtagtcagcaggattcagagggacctcccaacactgaacatgctgccttccctcttgggctcagtgcttggtaccagcattaatgcactatgttcctcagactccagaggtttcacagggtgtaaaagggtgagtcctcctgaattcagatctccctttcttttttggtgaggttttgcctttatttgggctgttctctccaactgcctctctttagaatggaggttttgatctctgtctatgggcaggagattctggtttcaggaataaaacaaaagataactgtctcctctgctgctatttcacagcaggtgttccaggtcgtagcattggcagtctaccataagtagtttcatttcttttggcctaaaattacatagcatgctgttaaaattgtagctgttccctattgcatgaaattcagacttgtattttcatttgtgaccaattcctgtttgttcaaaaccaaaggaaacatgaggatgagttcaattctctcgaagagaattgcatgaacagctgttacatgcaggagagggactcatgactcactggtgacactttgtggagtgatgctcacaaagcaacacactttgacctgatacactgtcctagccttggacacttttgaaaaggaaattctaaaattacgggaaactgctggacgaaactgagctttcctttaaggggcaaccatccttaggaagaccagctgcatttatgtataatacttactgtattagtctgttctcacactgctataaagaaatacctgacactgggtaatttataaagaaaagaggtttagtcagctaggtgcagtggctcatgtctgtaatcccagcactttgggaggcagaggcagggggatcacctgatatcaggagttcaagaccagcctgaccaacacggtgaaatcccgtctctactaaaaatataaaaattagcaaagcatggtgacacgtgccagtaatcccagctactcaggaggccaaggcaggagaaatgcttacacccgggagggagaggttacagggagctgagatcgcgccactgcattccagcctgggtgacagagcaagactccatctcaaaaaaaaaaaagaaaaaaaaaagaaaagaaaagaaaaagaaaaagaaaaaaaaagagaggctggataggtggagcacagggatttttaggacagtgaaactattctgtacaatacatcaatggtggatgcatgtcattatacatccatagagtgtacaacaccaagtgggtatatgggaactccctgtactttctgttcaatttttctgtgaacctaaaacttctctaaaaagtagtttagtaggttttttttagtgtgtgtgtgtgtgtgtgtgtgtaagtccctctagtaaccaggcatgacggcatccacctgtagtcccagctaccagggaggctgaggtgggaggatcacttgagctcagaagttcaaggacagcgtggacaatacagccagaccctgtctcttgaaaaaacaaagtcttggcacttccagagcccggtgctgccggccgcgggagatgagtgcccagtagggagacttctgtgaagcgtcccggtcctgcgacgtcgcccacccgggaggaggcggcttctcggttcctcaaggcccccgggagtccgaacctcggcaggaggctggcagcggcgtggggacccagagggcaggggcggtctgcggggcggccctgggactccctccctccctctcctgctgcggccgccctgggatatgggggccgtggatgtgggtcgccgctggaggtgtggccctgggtggtccatccggccgcagaggcccgtcccccgttcacccaggccggtaccctatggagcacctattacgtgcagtgctattctgggttcctgggatgccaccgagtgagacggacacacagactctcagcccagaggggaaccgtccctattaatcaggtatgatcctccctctgcccgtcgcctaataaccccattgtttccagacaacagatcaacaagtgcttcacgtgcaggcggcctggcatgcctggcatcttccagcacactccccttggctctgctacagcctttttggccttttacttcttgaacgtgtggttccttgggtaacgatgccctctttggtctggttaattcccctccttaggatttcttgtattagggcaatccttgctagtttctgtgtacaatttgccttttcatgggtttttcggactaccacatactcgttcctagcacttagcacaggcgtaaccttacagttatttgagtgcaagttacacaagaacaagaatttttccgcctaatttctagtaccaaccacattgcttggcacagagtatggttcaataaatatttgttggctgagaggcaaatgtatttgtaattatcatgtgagatacctgctgtaaaaaaaagggaatacctgcctggcagatgtgacttaatttgcatcctccaggatatggttttttgttttttttttttttgttttttttttacagagtcttgctctgttgtccaggctggagtgcagtggcgcgatctcccatctgcacttactgcaatgtctgccttccaggttcaagcgattctcctgcctcgacctcccaagtagctgggactacaggcgcatgccaccatgcccagctaattttttgtatttttagtagagacggggtttcaccgtgttagccaggatgctctcaatctcctgacctcatgatctgcctgcctcaacctccctaagcgctgggattacaggcgtgagccaccgcacccggccaggatatggcttttaagttgagatcttcagggtgagcagagcagaagtctcccttgaagccaggagctcaagcatagcctgggcaaaatagtgagactctgtttctccaaaaacatatgaagtttagcagggcatactggcatgcacctgtagtcccagctacttgggaggctgaggtgggaggatccttgagcctaggagtttgaggctgtagtgagcaatgattatgccactgcattccagcctggaagacagagtgagacctgaccatatacgtgtacatatatgattattacacaattggagattgaaatataatctataatcagtttttcatttactgtatttgaatatttgcctatgttgcaaaatattccacaatatggtttttaatgtttagtttatttttttccaatttataccaaactgttggatataaagtttgcattttttgatattataaataactctgcagtgaatatgagctgaaatctcagataaattcaagttgagatttttaaaattaaaaattggttttaaaatttggatacttaaacagtatatatgtacatggtaagaaaaagagttacctaagattctatggttaaaaaagcttccttgtctaggtgcggtggttcatgcctgtaatcgtaacactttcggaggctgaggcaggcagatcacctgaggtcaggagtttgagaccagcctggccaacatggtgaaaccctgtctctaccaaaaatataaaaattagctgggcatggtggcacacacctgtaatcccagctactcaggaggctgaggcaggagaattgcttgaacctgggaggtggaggttgcagtgagccaaaatcacaccactgcactccagcctgggcaacagtgagattccgtctcaaaaaaaaacttccatctctacttagaccctcagccccactctccagagaagaccactggtacattttctaaatgagagaaaatcatatgcactgttctgaacctgccatctgatacttaatagaacagatcgaaacattcttaggtaggtatttctgtgaaggaaaagttgcaacagtttacactcccgccagcagataatgggagtctggttccttgtactttctctagcttgaggaattatcaattatcactttttaagttctcaatctgatggatagaaaattacattttattgttttaatttgccatctttatttactagagagtaagaagctttttatatgcttattggttattgataggtgaattgatcacttgctatggtttggatgtttgtccactacaaacctcatgttaaaatttgatccctgatatggtttagctgtgtccccacccaaatctcatcttgaattgtaatagcctccacatgtcaagggtggggccaggtggagataattgaatcatggggccagtttccccatactgttcttgtggtagtgaataagtctcacgagatccaatgggtttataaataagagttcccctgcacaagctctcttgcctgccgtcatgtaagacatgattttgtgcctcctttgccttctgccatgattgtgaggcctccccactcatgtggaactgtgagtccattaaacctcctttcctttataaattacctagtcttggatatgtctttattagcagtgtgagaacagactaatacaatccccaatattggaggtagggcctaatggcaggtatttggatcatgagggcagatccctcatgaatagattaataccctccctgcagagggtgggggggtgggcacagtgagtgatttcttatgattaagagctggtggttcaaaagagcatggcatctcccctgttctctctgttgcttcctctcttgccatgtgatctctgcacatgccagctccccttccccttctgccttgagtggaagcaacctgaggccctcaccagatgcagatgcctagccttgatctttccagccatcagtcatgagcaaaatcaacctcttttctttttaaattaaaaaaagtaaaaacaaagtctctctagtaatataaaatgataaaacataaaattgaatcagatgtaaaatgtgttgtggacccctgacgtttttgcaacacaatcaaaacccatttcctctctcttgccagcagaggaaataggtttagttaaacaaggatgtgtttttggaggggtcatttggaaagggaagagaaatgatgggaggagaaaacgataatcaaacctctgtgggagagagggtcacacagattttaacacctttaacatgggaagtcaccattcccatctactccccatgtaggcagagaaatggggagaggcagaggagaaatgcccagaacaggagggaatggccaggagttgggcaagtcagttggcccctcctgggctcagttttatcccctgtaaaccagaagtagcaatacttaccttacactcttttgtggagattaaataaaataaagtgtttgctatgcaatgatgctgaataaatagtactaattgtcatacctgatgcttggcaaacaacaggaaattgctaagtgttgaatgaatcttactgtatgttgtcagtcactgacctctggcttttccaggtgctgtggacctactgacactttttcttatctggtattgtagaatttctcttgcctctccaaggccaactcctccctctgggattcctttggtccctcccacttgttaatccacagagctggcatccttatcatcagttatggaaagcctatggcttggtttcactggaacagtctcgggttatacctgttgtcctcatgttttgcttgtttgggtatttgtcctttttgttgttgttttaacaaagtattattgtcaatagttgcattaactgaagctggggtggatttagtaaacttccactttgtacttgcagcttctgccgtgctctcaccttataggctgtgagatacatgtgtagtgagcgaagtgcttttttttagcacttggtcacagtgtaactaaccccttctttttgagaacagcatgaggggcactcaatgataaagcaaagtgcagtctcatgccagcagcctagaaaaagcttgattagatggaaatcagaagacacagattgccaatcacaagaaccatcagcatctacttcaaaagttaatagctacattaagaagatggcgctaaaagataatgattaaaatgagggctacaaaaggtgagcctacatattactctatgaagcatgacttcatttagatcaaaagactgttcttctaagttaattatactcattactttctccaagtttttttatgcacacatgaaaagtgaagcaatggttgttaatgtgttggctccattaagagaagtcagcagttaaatgatgccatcagaggattcaaatagaaaatcatgatttaatgtttttcatttaattcatgaaatcaaaagtcttttggaaattcactcttgtagtttaagcatttgacattattgtgattaatattgaaatcagttgacaagtgcaacacagaggtaaaattacttatattggtaaaaataatgttcttactaaattaagaaacctgtaactagaaatgcacttggacttggttgttgcatgtgcctaatttctaaccatatccaaataagctgcaccattccaccatttgaaatagaaggtacagttgtcataatttataaagattttatacagttaaattaactgaactaaaaaagtttatgacaaagctgaacacaaaaggatatttcctaatggcagtacatgttctttgtccccttttccaattacaaaacaacttcacattttatgttataaaatatagtcatttgttgagaacataaagcctaggagaatgggtattttgatacaaactctgaacaaaacaccacccttgctacttcctgcacaatgattatgtttaacgaatagctcatcatcctgtacacaagctatttcattcgtgagaactgaagctgcttaaaaacattgataactttccaattccccagaagaggtcttatatataggcaatgtataggatatttattaaattggtgttgtatacacttaatattacatatccaagaaaagaaatttgagaaagagaaattaaaatgcacttgggagtttttttttcttgcaaccggtgttaaattcagctctttacctacagaatgcaaaacaagacacccaagaagaaccccactgttgttaagttacaaattgctgtacgtaagaaacagtttatttgaaggaaaatgcacttatttttaagttagtatcacaccatgtataacctaaagttagaaaagtcacttatttgaaggcacaattctattccagattatagacaaatcaaaatcttacagacctcacctggcaagaaaaatgaggtcactggtctatcctgtggctccagagtctacgtcacggtcacacccaggcctccaggagcagtatctagttctgtaagacagaaagttctatttctttctttcctctttctttctctgtctttctctttccttcccttctctctttccttctttctttttcccttccttccttttctttctctttctttccctccctccctctttctctttttctttctgtcttttcttctttctttttctttctttctttctctcttcctttctttctttccttctttctccttccttccttccttccctcctttcttctttttccctccctccctcccttcctttcttcctgctatattcaccatgtgaaaagattctgcagcctcctccgggctttcttcattctacccgaaaaggcaaatgacttcactttctaaagtagcatcagcaaccgctcttttgtggcaggaggaacaggaattgaagacccagcagaaagcagaagtcaactgctatagacagccttgacatagcttaagctaaaggctttgaacgagaataaaacaaaatacataagccctccaacatgtcagaagaagatagatttttagaaaaaataaggttgccctttcctttcatctgcttaaggaaaaaaaaaaagagagcgggtgggggccgtgactggcttcatcaagccagtaaaagacaatgaaggtccataaaatactctatggtattactttacttcaaaatagtagttttcctcaggccactgaaaaaatggtagcaacctataaatgtatacatttgaaaaaaaaagtttaggtccaaggtaatgactaatctctgagtctgtgcctataaagagaaacaatgattcctcgacacatacactctcccaagactaaaccaggaagaagttgaatctctgaatagaccaataacaggagctgaaattgtggcaataatcaatagtttaccaaccaaaaagagtccaggaccagatggattcacagccgaattctaccagaggtacaaggaggaactggtaccattccttctaaaactattccaatcaatagaaaaagagggaatcctccctaactcattttatgaggccagcatcattctgataccaaagccgggcagagacacaaccaaaaaagagaattttagaccaatatccttgatgaacattgatgcaaaaatcctcaataaaatactggcaaaccaaatccagcagcacatcaaaaagcttatccaccatgatcaagtgggcttcatccctgggatgcaaggctggttcaatatacgcaaatcaataaatgtaatccagcatataaacagagccaaagacaaaaaccacatgattatctcaatagatgcagaaaaagcctttgacaaaattcaacaacccttcatgctaaaaactctcaataaattaggtattgatgggacgtatttcaaaataataagagctatctatgacaaacccacagccaatatcatactgaatgggcaaaaactggaagcattccctttgaaaactggcacaagacagggatgccctctctcaccgctcctattcaacatagtgttggaagttctggccagggcaatcaggcaggagaaggaaataaagggtattcaattaggaaaagaggaagtcaaattgtccctgtttgcagacgacatgattgtttatctagaaaaccccgttgtctcagcccaaaatctccttaagctgataagcaacttcagcaaagtctcaggatacaaaatcaatgtacaaaaatcacaagcattcttatacaccaacaacagacaaacagagagccaaatcatgagtgaactcccattcacaattgcttcaaagagaataaaatacctaggaatccaacttacaagggatgtgaaggacctcttcaaggaggactacaaaccactgctcaaggaaataaaagaggatacaaacaaatggaagaacattccatgctcatgggtaggaagaatcaatatcgtgaaaatggccatattgcccaaggtaatttacagattcaatgccatccccatcaagctaccaatgactttcttcacagaattggaaaaaactactttaaagttcatatggaaccaaaaaagagcccgcatcgccaagtcaatcctaagccaaaagaacaaagctggaggcatcacactacctgacttcaaactatactacaaggctacagtaaccaaaacagcatggtactggtaccaaaacagagatatagatcaatggaacacaacagagccctcagaaataacgccacatacctacaactatccgatctttgacaaacctgagaaaaacaagcaatggggaaaggattccctatttaataaatggtgctgtgaaaactggctagccatatgtagaaagctgaaactggatcccttccttgcaccttatacaaaaatcaattcaagatggattaaagatttaaacgttagacctaaaaccataaaaaccctagaagaaaacctagacattaccattcaggacataggcgtgggcaaggacttcatgtccaaaacaccaaaagcaatggcaacaaaagccaaaattgacaaatgggatctaattaaactaaagagcttcagcacagcaaaagaaactaccatcagagtgaacaggcaacctacaacatgggggaaaattttcgcaacctactcatctgacaaagggctaatatccagaatctacaatgaactcaaacaaatttacaagaaaaaaacaaacaaccccatcaaaaagtgggcgaaggacatgaacagacacttctcaaaagaagacatttatgcagccaaaaaatacatgaaaaaatgctcatcatcactggccatcagagaaatgcaaatcaaaaccactatgagatatcatctcacaccagttagaatggcaatcattaaaaagtcaggaaacaacaggtgctggagaggatgtggagaaataggaacacttttacactgttggtgggactgtaaactagttcaacccttgtggaagtcagtgtggcgattcctcagggatctagaactagaaataccatttgacccagccatcccattactgggtatatacccaaaggactataaatcatgctgctataaagacacatgcacacgtatgtttattgcggcattattcacaatagcaaagacttggaaccaacccaaatgtccaacaatgatagactggattaagaaaatgtggcacatatacaccatggaatactatgcagccataaaaaatgatgagttcatgtcctttgtagggacatggatgaaattggaaaccatcattctcagtaaactatcgcaagaacaaaaaaccaaacaccgcatattctcactcataggtgggaattgaacagtgagatcacatggacacaggaaggggaatatcacactctggggactgtggtggggtcgggggaggggggagggatagcattgggagatatacctaatgctagatgacgagttagtgggtgcagcgcaccagcatggcacatgtatacatatgtaactaacctgcacaatgtgcacatgtaccctaaaacttaaagtataataaaaaaataaaaaataaaaataaattaaaaaaaaagagaaacaatgattatgacaaaagaagatgttagagaaggaaaatggaaaaacttgagtagaaatgtacacacaagtgctccccattctggtctcatgcttctaaacagccttttccctgaaagccttccaaactagttctgcttgggcaagatgtatgtctaaattcttttgcttttatcagttgtcaagaacataatgttgagttcaaaggataaccaaaccttgaatctgattagcttttattccattctcacttgcaaaaatcatgaactaagctttatttagcccttcactgggatatctgtaacgacatggatcagactccttgaagtgactgcgatatggccagacttcatagaaaactgtgttggctgatggagactctcaatatttataggaaagtcatgtgtaatgagatgggacttctacagattaattgtcccaccactggaggaagtgcagctgccctgggtgcagccctgcctctttttgctctgctgccttaggccattggagctaccacttctagtacaagcccttctgctctcccaagcccttggcataagtgtcaagatctctgaagtgttgtctgaaagttctcttgcttggtttcaggtgcttccccctcactcctgaccctgaggatgggaggaaacttgctatagcccttaacgactccttccaaagatctttcctttccctgcttctctgtacttttgttttttttttgtagcaactttattcataataatcccacactggaaataacacaaatattcatcagcaaatacataaaccaattgtggtatattacaatgaaatcctattcagcaataaaaataaaaagctacagacatatgcaacagcaagtatctctaaacatgttaaggtaaagaaactaaacacaagagtatatactatctgatttaattcatatgaaattctaaatcagggaagaaaactaaccttccagtaacagaaggtggatcagtggtgacctagggctggggagaatgactgcaaagggagaggaaatttattctggtaagaaaatgttctttactttgattgggggtggtggttacatggttgtacacggtcatcaaagatcattgaactctacagtaaaaatggctacacttaattatagtaaattatactttcattaagttgatcagaaagaaaaaacgtcccaatgaggcgatagtcaaaagtcaccacaccagtgtctgtcttaatatttgaataggcactaaatttctaggtttctatttgtttcatagcacatgtcagggggccaagtttccatctaaataaatggcttaatgaattaaattatatagaggaagatacttttatatatatatatacttcttttattttcagagatagggtcttcctctgtcacccagcgtggagtgcagtagtgcaattatagctcattgcagccagcctaaaagaggaagatataacaaaattattcaagaaatgaatcaaagcctatggtctaaatgttttccaactgagtgattaacttttgatatgctattttgtgtttatgtttgaatcctgagttgtcaagtgtttagaaaaatctgtcaagtacacaagtctacctttgtggtagttggatcaaaatattaaatctcttatcaaatgtttaagaaaatgtgattaacaaattatgtaagtggtatcaaatgttcaggataattggaatttacaaattgttaaagaaatgggaatgtaatttctcatttttatcgaatttactgttcttatgatatcttcaagttgagcttagagatttaaaaatgctgtattttaaaagtaaaactaacattgttaacattatttactgtaagttatctttgtaagagtggtaaaatatatacatgatgtgtcgttacataatttcatttaaaaaacgcatcactttatgtgtttttatattgctataaaccataaggccagtctacaaggtttgtagataaaatagaaacataccttccttgaaaagcagaataaatttcttaaaaggcaggacggaagtgtttgaactatgtgtcaacaagctttactgtcaaagcaggcttttggtatggaaagaaaaatacttataaatacttgttttaatatttgctttattaaaatacatttaaaatacagcttctctctactcttcaacttctcatgtaggttggaggtgggtggttgctaatgtaggcatgacttgtttttgcagcctcttcctatgttctgcttaggtggtctagggtcctggaggtatttgccatgggctcaactgtccttgaccttctcaacttgtaaagacaatagaaatatttgcttctaacaaaatttcattattcacatagcaacttatcttcttgaggaaatattcaagaaaccagactgctgtccttagaaatatgtgccaacttcatgcatgcgtgtctgaaggtcctcattattcttccctcttgagatgggggagacccttattattcattcacaatcctgtgggaagtgcagggagcctttcctttagaaaatatgctatttatctaaaggtggaggtttgaagaacagaggttttaagcatcacactcagaaatggaaatgttatgagagacaatagggtttccagttacagccctaaaactcaacatgttcaaaattaaatgcctgatctccccatccaaaggtgctccatgtgctgctttttctaacacacttgacggcaatgtgttattccagtctcttaggcccaaaatcttggggacatcactgacttctctctctctctcactctacagattagcaaatcctatgagttctatatggaaaatatatccagggaaattcagcttctgcttaggatgataaaattcagaaagagtgtcatctccactcttacaacaaaaatttatagttgtataatctacaaaataaaatcttttcttgaactgatcagagagctgaagttgcagggcaattggctaatctgaaatctaaagaaaaacagatgcctccaagaagacatgagccatgtgcaaatgcctccctggggcagaggctggacgccaaataaactggtaagaaaaattcaaagttttttttgccaaattgctaaagtgagtatgtgtgggctaacatgagaatatagaaccccagagatccatggacatgaaagaaatttacatgtacatgcaggctcttctccacagactttactggattctcagaaaggttgggtcgggatgagagttcagagaaaggttccttcatggtgcagacctaggggacgtgggcaacagctactgtaggaaaaagcccaaagccccacccagatccttcacatctgtctcccatatggaacaaagcattaagcagctggaaagaacagcaaatctgcttttcctcaggtaaaggaacagaaagaaaacccttttgtaccactggggaaaggatagaaaaatatcctgggcctaaaccattagagatctactgagatgcccaagggaaggaccactgagaagtctccacttctggaaccctggaccatagtgactaacactgtgactgaaccataacaacagagctccctgtgcatacaccccccgccccaaccgggttaataggtcctgagtgataagtaacagcagtctactactgataaaggggagatacaaagaaggacccactctgaggcgcaggtgtgcaaagggaagacctaaagcagagggtaaagcacctattgagaaaaatcttctgcaaacaagtccatccagaacacaaggcaacagaggattagaagcctgggtgcactgaaaataaacacagcattatcagtacccaaacttagggtactgttcatctaataactagattgactcaacctcacataaaaactgcctagtaagggtaattggcaggccatatgcagaagattgaaactggacctcttccttacattatatacaaaaatcaacttaagatgtattaaagacttaaatgtaaaacccaaaactataaactataaaaaccctggaagataacctagaatataccattctggatatagggcctggtaaatatttcatcatgaagactccaaaagcaactgcaacaaaaatagaaattgactaatgggacctaattaaattagagagcttctgcacagcaaaacagactatcaagagagtaaacagacaacttacagaatgggagaaaatattagcacactatgcattcgacaaaggcctaatatcagggctctacaaaaacttaaacaaattaacaagcaaaaaacaaacaactccatgaaaatgtgggcaaaggacatggacagacaattttcagaataagacatacacatagccaacaagcatatgaaaaaatactcatcatcactaaacgttagagaaatgcaaatcaaaaccacaatgagataccatttcacatcaatcagaatggctactatcaaaaagttttaaaaaaaaaaccagatgctaggaacgttgtggagaaaagggaatacttacatgctgctaatgggaattagttcagccattacggaaagtagtctggcaatttctcaaagaacttaaaattgaattagcatttgacccagcagtctcattattgggtatatccaaagaaatacttaactatgaagcaatagtaaccaagaaaatttagtactgataaagatagacatacatatcaatggaatataattgagagtcaagaaataaacccacacatctgtggtcaactgattttcaacaagcatgctaagaccattcaatgatgaaagaatagtctcttcaacgtgattctgggacaactggataaccacatacatatacaatataaacaatttaactcaaggtggatcaaagatttaaatgcaagagctaaaactgtaaatctcttaaaagaaaatgtagggataaatcttcatgaccttggataataaagtaaaaaaatacttcatggaatgggagaaaatattccaaattatatatctaagaaggaactggtatctagaaaatagatatagacagatagatgataaatgatagatagatagatagatagatagatagatagatagataatcacttacaactcaataataaaaatacaaataactcaattttcaaaaagagaaagtatctaagtagatatttctccaaagataagcacatgaaaagatcctccatgtcattaataaccaggaaaatacaaatcaaaaccacaatgagatacccttatatggtagtggaaacttaaaatggtattcttgctttggaaaataatctggcagttcctcaagtgtttaaacatagaattaccatatgatccaacaattacacccctagagaatacccaagagaaattttaaaaaatgtgtccacacaaaagcctttgggttatttagcagtgtactgtttattttcaaatttcttgttatctagacacacacacacacacacatacacacacgtgcacgaaaatgaatatgtgagatacagctaaagaaatgctgagagggaaatttctatctctaaattcttacattaggaaaaaagatctcaaatcaataatcgaagctcacacctttaaaagctagaaaaaggctgggcacggtggctcagacctgtaatcttagcacttttggaggtgggcagatcatttgcagtcaggagtttgagaccagcctggccaacatagtgaaaccccatctctactaaaaatacaaaaattagctggacgtggtggtgggtgcctgtagtcccagctactcgtgaggctgagacaggagaatgacttgaattcaggaagcagaggttgcagtgaactgagatcatgccattgcactccagcctaggtgacagagcgagactccatctcaaaaaaaaagaaaaatcctaggaaaaaatagcaaaataaaccccaaatgagcagaatgaagacgcatggctgattctatgtttgaaaatctgtcagtatagttcattgcaataacagtctaaagaagaaaaatcagatgactgtatcaagttattagaaaaagcatttgacaaaattctacacactgtcatgattaaaaactcagaaagctagatattatagaggaactttctcaacttgataaataacatctaccaaggagacatcatggctgactagagatacccaacactcacctctttcacaaagaaagatcaaaacagagagtggacaaccacatattgaatagagtgtgtaagagaaaacactggaattcatcagggaagtgacaggaaccctctgaggcactgaaagaaagggaagtgagcagttgccctggctgggatcagctcagtgccaggaagaactccccattgtgggaaaatggtaagcaagagattcacagtgatgcacattctcaccatggacacctataagcctagccacaggagaacctcttggcccttacaggccataagcctagtatgggagctgcctagagttcatgtgactgcatcgtttcagggagaaaattcacactggatcccactcacctctcaagacccaagctccttaagggaattctacatttggaagttaagggaaaatatctaccatcatgaaaacacacaaaagtgtaaacatcactggtggagcagataaacaaatgaaaaagagaaagaaatataatgttgtcactacagaaaaccaccaaatcacaaaagtaaccaataagagaggaagaaaaaacaaaggatgtacaagtcaatcagaaacaaataagaaaatgacaggagtacttcctcacctatcaattacgatcttgaatgtaaacagtttacatatgcagttaaaagatatagactggctgaatggataaaaaagacaagacacaattatatgctgcttacaagaaactcacttcacctgtaaagacacatagattgaaactgaagggatgaaaaaagatattttacccaaatagaaaccaaaagcaggtaggattagctatatttgtattagataaaatagactttaagtcaaaaaacataaaaagagataaaatggtcatagtactggtataaaaataaacacacagaccaatgtaacagaatagagaccacagaaataaagccaaatacttacagccaactgatctttgacatagcaaacaaaaacatgtaagtggagcaaggacaccttattcaacaaattgtgctgggacaattggaaagccacatgtaggggaatgagactggatcctcaaatgaaaaaggagacattacaactgataccacagaaataccaaggatcatcatagactatgatgaacaattatatgctaacaaattgtaaaccaagaggaaatagataaatgcctggacgtatacaacacaccaagattgaactagaaaggaacagaaaatctgaacataccaataacaagtaacaagattgaaccagtaataaaaaactctcccaacaaagaaaagcccaggaccaaacagctttactgctaaatcctaccaaacttataacaaactaacactaattcttcttaaactgctcaaaaaaattgaaggggaatttttactaactcattctatgaggccagcattaccctgataccaaaaccagacaaggaaacaataaaaaagaaaactgcaggcaatacccctgactaacatagatgcaaaaatcctcagcaaaatactagtaagctaaatccaacaacacatcaaaaagataatacatcatgatcaaataacatttattctagggatgcaaggatggttcaacacacacaaatcaataaatgtgatacatcacagcagcagaaggaaagacaaaaaccatatgatcatctcaatagatgcagaaaaaaggatttgataaaattcaacatcccttctaaataaaacttactcttaacaaattaggcactgaaagaacatacctcaacataataaaggccatatataacaaacccacagctactgaatggggaaaagcaaaagcctttcttcctttatgcactggaacaaggcaaagatgcccactttgaccactcctattcattatagtagtggaagtctgaatcagaatgatcaagcagaagaaagaaataaaagatccaaattggaaaagaaaaagtcaaattgtccctctttgcagatgatatgatcttatatatagaaaaagactaaagactccaccaaaaacctcttagaactaataaacaaattcagtaaagttgcaggatgcaaaatcaacactaaaattagtagtatttttatacaccaacaataaatagctgaagaacacatttaaaaagcaatcccattttcaatagctataaaaataaaataaaataaaataaaatatctaggaatacagttaaccaaggaggtgaaaaacctccacaataaaaactacaaaatactgatgaaagaaatttaagagaatacaaaataatggaaaaacatcctgtgctcatggattataagaactgatattgttaaaatgatcatactacccaaaacaatccacagatgcaatgcaatccctatcaaaataccaattatattcttcacagacagaaaaaaaaaatcctaaaatttgtatggaaccacgaaagatcctaaatagtcaaagcaatgctgagcaaaaaaaacaaagctagaggtatcacactaccttacttcaaaacatactataaagctgcagttaccaagacagcatggtattggtatatagacacataaaaaaaatgaaacagaatagaaaacccagaaataaatctgtgtattcacctgacattcaataaaggcccctaaaacatacatcagagaaaggatatcttatcaataaatggtgccagaataattggatatccatatgcagaagaatgaaacgacctctgtctctcaccatacacaacaatcacctgaaaatggattaaagacttaaatgtaagacctgaagctataaaactactggaagaaaatacagaggaactgcttcagggcattgctatagccatagattttatggataagacttcaaaagcacaggcaacaaggcaacaaaacagacaaataggactatattaaactaaaaaactactgcacagcaaagaaaacaatcagcagagtgaggagacaacttgtagaatgggagaaaagtttgcaaactattcacccaacaacggtctgatattcagaatatacaaggaactcacacaacttaacaaccaaaaacaaataacccaatttaaaagtgggcaaattatctaattagacatttctcaaaagaaggcatacaaataaatggccgacaaatatatgaaaagacgttcaacatcactaaccatgaggaaatgcaaatcaaaaccacaatgagatatctcaccccagttaagattggctattatcaaagagacaaaaaataacaaatgctggcaaggatgtgaagaaagggaaattcttatacactgttggtgggaatgtaaattagtagagccattattgaaagtagtataaagacttctctgaaaactaaaaatagaactaccttacaatccagcaatcctactactgggtatttatccaaaggaaaggaaatcagtttctcaaagggatgctcatgtttattgcagcactattcactattgcaaaggtatggaatcagcctaaatgtccatcaacagatgaatgaataaaaaaatgtggtattatgtgcacaatagaatactactcagccatttaaaaaaaaaaaaaaagaatgaaatcctgtcatttgcagcaacatggatgagcctggaggacattgttaagtaaaataagtcaggcgcagaaagacaaataccacgtgttcttacatgtgggaactaaaaaaaaatggagcccatagaagtagagacttacggttatcagaggctgggaagggtaggagggtagggaagatacggagaagttggtgaatggttacaaatttcagctagatatgaaaaatgagttctgatgttccacagcactgtagggtgcatatggtaaactataagttactgcatttttcaaaaagctagaagaaagaattttgaatgttcccaaaacaaagaaatgataaatgtttgaagtgctggatatcctaattaccctgatttgatcattatacttcatatgcctgtttcaaaatatcactctgtgcaccttaaatacgtataattattatgtgtcaactaaaatttttttttaaaaaggacatctacaaaaacaaaatgctacagctaacatgcttaatgatgaaagattgaagcctttctccctagataggggtagaaacaagaatgttttctctcatcactctttttttaaaagcaggaataaacaaaatattaatgattgtttaaaggataacacttaaatatttacaaagtaaaaatttaaaatatcttgaccagggttttctatgtattatgttaccatcatgactctgattttacctttcctagagcagtttctcagaaagaaagtaaaagaactaataacagtctctggggcttgcattgcctgctcaggcctgttgtcccctggcagatcaaagcactgaaatgaagaagcagtgtcctcacccctctctctcctcctcgcccctctctcttgccccttttgtttttactttgagtatttctgaataataaatgcaaaattagggttgaatataaaccaaaagagccagatgaccaccccaattcaagattgcatttcattccaggagacctggcacagaaaggattccccttcatctacagggttactgcaacagaaatcaaagatcatacatgaatatcatttgtaggctctgagcaaagacaaacctagtataaattcatctgcaagtgaggagatttgaaccaggtggtctgttatgtcccatctagcctggcaagccagcgtgaaagctcagatcttccaccgtgaaaggacttgccctccccgctaaggtggacgcagaaaggaaagaccatcatactgtggcaccaaccttctaatataaaaaagaactatgttggggttaaagtacatcaataaagtacaaatttttaccatacttacaggacaaattaattcttaatagtttgaaatatatgtataccataaaactctgtcaacctacatacaccaaagactttcctgtgggtatagaaaatctgagtaagccaagcaaattacttgaaatcctgagaggccatacataatcttctgcatccattatgcctctctattatacgttattttctaggtcacttgaacaagagcatttcttacctcagagggtctaaaacaccttttttttttttttttgagacggagtctcactgtgttgcccaggctggagtgcagtggcaccatctcggctcactgtaagctccgcctcccgagttcacaccattctcctgcctcagcctcccgagtagctgggactacaggtgcccgccaccatgcccagctaattttttttgtatttttagtagagatggggttttactgtgttagccaggatggtatcgatctcctgacctcgtgatccgcctgcctcggcctcccaaagtgctgggattacaggtgtaagtcaccatgcccagccctctaaaacaccttttttaaaaaacttatgattcaaggatttgaaatcctaacgttacaggcaaaatctcatttttataaaatataaaatgctgtgtttctttcacacctaatagcttgtcaagagaagtcactactaaattgcattcctgcagcctttccaggtagtgggatactgcttgtttgatctccactgaaccccgtacaggagtgataagtttcacgtcttgcaattctgccactccatttattccagggctggagcgatctgcaatttgatatcaggatgattatcctgttatgccttcattatttggggtgttgctgtacctgttcctttttgtttgtttgtttggttttttttttttgagaagaacaagactttccagattccatcctcttggccagctcttctgctgatgtcatgtcagttttagcaactaaaaagtcagaggtgattccttccatggttttgtttgggtcttgcaaaatgttaagaacaacttcctgtaacacttgtgttggtattgcctcatttttaatggccttttcatatagcccagtagcatcataggtgcctttcttggctaacaactttgctttgtagaaccagaatttagcagttcttcagcctcaggaatactagacaatatggcaaatatttccttaaaaaccacacccctttcaatgagctgcagacattctgtcagagtgttgttagttttatggagcagttgaagctgtgctttcttttcttcctcttttttttcaacggtcttccagaatatttattttctctattatttttctttctgttttacgtgtcataggaggccacttatagattttccccttagatttctgtcattcttccagttgtttcctttgatcctctgctattgtcttcttttcggtatttggattcatttgggtcccttttgacactccttttccttcatgattgtgttaccagcttgagttttgggagctctcttgtttagaaaacagaagagcctttttcagcttggagaccaatgcctgtgctctatgttgtaagctgttgtggcatttgtccccattagttccatttgctcttacgccgtgggtgctgggaatgactgaatttaagctgccaactgtcaaactagcctctggcttatagcttttgatttttgcagtgcacacgaccaaggcccaaaacaaggttgaatggactgctgatcttgcttaatgtttaaatgtctgttactatatcctccctgaaacaaactggagtatgtcctggttttggtatgttttacttcctattcactaacttatacatgctctttaataattaaccctattaacctttgtaccctccaccattaattttttatttttgatgcttgagtcctactaagggtctgaacaaagagagagggaactgtcttgggggcttttctcccagtcttggaagatcttcttgagagagttgctatgactttactgatagaagcttgacttgtgtttctccaacaaattgtttatgaactctgtctttcagggcagcactagtcactgaatatctgcccaaggcttgttgaggaaccaaattgctcttggttcaattatgagagttattctttaacttctttatagtacataattgagagtctggcttcctctcagggtctgacaaggtttgaggcaaattctcttcattaatctcttttagaaagctaaccaaagattaattttcaatgcgggcatttcctatggagtctgtacacttaacattccttgatatgttaactgctgctttgtagtcttcaaatcctgtgcattaagtgaccccatgggttttcttgacagcttttccatggtgaatgatccagctttgtgctgctgtaagctactgctggaggcttacagtttggttagaaggaacatattcagccttttgcccagttttagtggcttcaactttggcttctgggaccttgtaatattggcttgtctggcctggagtttaatgctgatgggccttatgctttaacaggcaaaacagcatgattgataacattctcttggatagatttgggcaattatttttggcttttagataaagctcagtgtttggcacttgaagttcctttcgacttctaggtactcctggagctttctctgttgttcggtggcagcagtggtggtgacaggccctggcctcaccatgacttctcagtcacagtgtttcttcctctctcaccacttttattgagtatagtactggaagtcctagccagggcaataaggctagaaaaggaaataaaaggcatacatatcagaaagaaagaaataaaactatctctatttgtagatgacataatagcctttgtaggaaattctacagaatctacagaagagactcttagaactgataagtgagttcagaatggtgacagactacgtgatcaacatgcaaaaagttaactttaattctttttttttagacatagtttcactctgtcgcccaggctggagtgcagtggcatgatcttggctcaccacaacctccgactccagagttcaagtgattctccagcctcagcctcccaagtagctgggactacaggtgtccgccaccatgcccagccaatttttgtatttttagcagagacaggatttcaccatgttggccaggctggtctcaatctcctgacctcaggtgatccacctgcctcggcctcccaacatgcttggattacaggcgtaagtcaccatgcctggccaagttacctttaattctatatactagcaataaacccatgaaaaccaaaatttaaaatataataccatttaatttgctcaaaaatgaaatagctataaatttaacaaaacatatataagacttgtatgctgaaaactgcaaacactgatgaaagaaatcaaagaagattcaaataaagaggaatgtgttagtcagcattctccagacaaacagaaccaataggatacatatatcaatagatggatgagatgggatttactatgggaattgactcacgtgatcatggaggccgagaagtcccgcgatatgctgtctgcaagctggagaaccagagaagctggtggagtggctcgttctgcatttgaaggcctgagaaccaggggagatgttggcgtatctgtcagtcagaggctgaaggcctcagactctacagaggtagagattgggactgggtaatctcatagcactggtgtaagtcttggagtccagtggccagataacctggagttctgatatccaagggcaggagaagattggtgtcccagctcctgaagaaagagtgaattcatctttcctctgcctttttgttctatccaggctcttaactgattgaatggtgcccatcttcattagatgagggcagatcttccttactcagtccactgattcagacactaatctcttccagaaataccctcagagacacacccagaaataatgttttgccagctatctggctatcccttaacccactcaagttgacacctaaagttaaccatcacagggagacatgctatatccatggactgtgagcctcagcataataaaaatgtcaattctatccaaactgatatataggtttaacacaatttctgtcagaattctagacatatttttgtaaatatatatgactatttttaaatttatatgaacaaagggaaaaaaagagaactgaaagagtcaaaacagaataaagtggaaggaatcaatatacctgattttaagacatgataaagatgtagtaatcaaaactttgtgatattggcagaggaacagacacatagatcgatggtacaaaatagaaaacctggaaacagccccgtacaagtacagacacttgatttttcaaagtagcaaaagcaattcaatggaggaaggattgattccacaagtgaaacagtcttttcaacaaaaggtgctggatatccataaacaaaaaatgaacctcaaccgaaacctcataccatacattatacaaaaattatctcaaaatagatcgtaggttcaaagataaaacataaaactataaaatgtttaggagaaaatcttcaggatctaaggctcgatggcagattcttagacctgacatcaaaagcatgatcaattttaaaaattgataagttggatttcatcaaaatttaaaactttcgctctccaaaataccatgttaaggatgaaaacaaagctactgaccgggtgaaaatatttgcaaaccacccatctgacaaagggttcaaatctaggatatctctctcaaaactcaacagttaaaaacaacaaaacaagacaaaaacttccattacaagtgggtaaaggtgggaaaactcaaactgtttttcctctgcactcatatagcaacaatcaacacagaagacttctgtgaccaaatgtgggagatttcttctccaccaacaagcaagcaatcaattctgcagcagacaccagctgggtgtcctcaatccaattctaatctgatgctatctatctggaggtaacgtcagacaccacggggatgagcactcagtcccatggaacttctccccacttccaatgccaattgcaaggaatgtgcttctgactcactggctatgaatcagagatctcacgacctcttccttgtgtttaattaatttgctagagcggcccacagaactcagggaaacacttaagtttgccagtttattataaaggatatagatgaagagatgcatagggagaggaatggggaagggacacggagcttccatgacgtccgcaggtgcagcacttttcaggaacttgtatgtgttcagctgtccagaagctctctgaacccagtccttttgggtttttacagaagcttcattatgtaggcataattgattaaatcgtttaatcgacttactcttcaggtgaccagtcgccatcctgaagctacggaggtgctcccagccatcagtcaattcattaagacacaaaaagacatctctttggagagtctaaggattttaggggttgtttggcaggaaacagggttgaagaccaaatatatatttcacaatatcacaatgggtgaaagacataaagagacattttatcaacaaggatatatagatagaaaataaacacataaaagatgcttacatcgctaaccatcaggaaaatgcaaattaagatcataatgagatattattactatgtacctaatagaacagttatagtaaaacatagtgacaatatcaaatgctggctaggatgcggggaaactgaatatctaatacattgaaaatgggaatgtaaaataatacacccactctataaaactggttgtcaacttcttaaaaagaactaagcatacactcactatactacatgaaccagcaattgccctcccatgcatttgtcccagaaaaatgaaaacttatgtacacacaaaaaaccgtgcacaaatgtttgtagcagatttatttgtaacagcaaaacactggaaacaaccagtgtaagacaaacttgtcttacaagtgaatggctaaacaaacagtatgcatccatacaataaaataacactcagcaataaaaaaataaattatttatatatgcaacaacttgtaaggatctcaaaggcattatgttgagtgaaaaatcaaactcaaaatgttacatactgtatgatcccatttatataacattgtcaaaattacagagatatagaagaggttagcatttgccagagacttagtatggtgagggtgggtgtcactataatgaggtagcaccagggagacctttatggttatggaattgtctgtattttgactatagtggtgattacacaaacatacacaggagagactgaacataagcaaaagctaggaatattaccagacccagctggaaataatgttcagccgggtggggaggttcatgtctgtaatcccagcactttgggaggctgaggtgggtggatcaattgaggtcaggagttcgagaccagcctggccaacatggtgaaactctgtctctactaaaaatacaaaaattagccagccgtggtggtgcacacctgtaattccagctactagggaggctgaggcaggagaattgcttgaacccagggggcagagattgcagtgagccaaaattgcaccattgcacgctagcctgggcgacagagtgagaccccatctcaaaaaaaaaaaaaaaaaaagaaagtaagaatattcaaacacttattacaatatagacatcgactcttaaattatcccaaattatgatataatcatattcagttgatggggaatagaaagtgttcacgtgtggcattaagtcagcaatggtggagcattatattaccatctgtaattgtgggaagtcaaaagtaacgcctaatactgaaaaatgaagaagtggcaatatgaacatgttatatgagatatggcagtaaaagtctaagataatctattaaaaattgagaatagttgcttctgggagatagaatatggttggatgttagggagactccaatttttatatgtaaaacttatataactatttatttgactcttagtgtgtacatgtaactttgagaaagataaacactaatttagatcattacacgaatgttataggagttacacacaaaggccaggtggggtggcttacacctgtaatcccagcactttgggaggtgaggatggtggatcactagaggtcaggagtttgagaccagcctggtcaacacagtggaaccctgtctcctggcatggtggcatgcgcctgtaatcccaactacttgggaggctgagacaggagaatcgcttgagcctgggaggcagaggttgcagtgagccaagatcacaccactgcactccagcctgggcaacaaagtgagactccatcttaaaaaaaaaaaaaaaaaaaaaaaaaaaaaaaaaagttatatataaaaagaatatccatactattagcactagtaagagaatttcataagctttccagctctaagattgatgttcaaaactcaattgcaatcctattcagtagtcaacaaccactgaaaaaagtaataataaattttaaagattccataaactagaatatattaaaggcgtctctaactaacgatgcaaaagaccattatagagaaaaaaactgtaaaattgtaaactgaacttcataaaagaaaacctaaataaatagaggtataccatgcccataaatgggaagtctcaatactggaaaaatgtaaatgtctccaaaataatatatgaattccatggaatcaattaataaatctaaaaggatttttcatgaaagttgataaagtgagtctaaaatgcatttaagccaagaatagtcacaacaattttggataagaaaaggtgagatgacttgcccaaaagatatcaaaacttactgtggagctatgctaggccaggcacaagcatacctcggagatattgcaggggaatgttgtggctagtttgatcatctctcgagaccactaaaattttctccttatcagcaataagactgtgttgctttcttatcagtcatgtgctcactggagtagtatttttaatctccttcaaaaacttttccttggcattcacagctggctgagtgtctggtgcaagaagcctagctttcagcctgtctcagctttgggcaagcctttttttactaagcttcatcatttctagatttgatttaaagtgagcgatttgcaactctcgctttcacttgagcacttagaggccgttgcagggttattaattggcctaatttcaggccaatgcctctccctgtgcctcaggctaagtagggaggcctgaggagagggagcaagacgggggaacggccagtaggtggagcagtcagaacacacaagacattttccatcaagtgtgctgtttcataaggacacggttcgcggagccacaagaccattacactaatcacagatcctcagatcagatataataattattaaaatttgaaatattgcaagaattaccaaaatgtgacagagacacggagtgggcacatgctgttggaaacatggcaccaatagacttgctcaatgcagggttgccacaaaccgtcaatttgtgaaaaacgcagtgtctgtgaagtgcaataaagtgaagcacaatttaatttgcctgtattgacagagagctagacaagtagatcagtggaacacagagctcatcgaaggaaccacagatctatagacactcgctatatagcaaagctggcagtggatatcagggggtgctggataattaatccttccagagaaaagataagattcctatcatctataaaaaaataagattcctaccatctataatgcatacacacacgtgtgcacacacaccagcagaaaaatataacaagatgtgatggtgtgcgcctgtaatcccagctctttgggaggctgaggcaggagaattactagaacctgggaggcggaggttgcagtgaacctagatcgtgccactgcaccccagcctgggcgatggagtgagactccgtctctgtctcagccagtgtccagaagagcttttcccaagttttcttctttttatagttccagatcttacatttaagtcttaaaaagataaatttaataaaagtgcacaaggtttatattaaaaacaaagctgtttgtaaatgacataaaagacaacatgaaaaaatataaaaatatacagtgatcctgaaaaagaagccccaatatttataccactgtatgtataatataggaatactctggctgtgtacatccaattccctctcccagcctttgtgccattgtatcaggtattatatgatattaatgcgttattatcataatatccacactgcgttattatttttagctttaaacattcacttatcatctatagattttgtttaaatgtcttttaaatttatgcatctatttactttttctgttcttcattcttgtgtatggatccagatttacatctggtgtcattttctttgtgcctgaagggtgtccactagtatttcttataattcaagtctgctggtgatgatttcttttgcttttgtttgattttaaaatacattaatatcggaatagaagaaaggaaaactccttaactctttaacttcctaaaaggtatctatttaaaaaatgcaataaacattcaaaaatattatatatatatgtgtatatatatatatgtgtatatatatatgtgtatatatatatgtgtatatatatgtgtatatatgtgtatatatatgtgtatataatatgtgtatatatatgtgtatatatatgtgtatatatatgtgtatatatatgtgtatatatatgtgtatacatatatgtgtatatatatgtgtatacatatatgtgtatatatatgtgtatacatatatgtgtatatatatgtgtatatatatatgtgtatatatatgtgtatatatatatgtgtatatatatgtgtgtgtgtatatatatatatatatatatatatatatatatatatatagcgagatgaaagggataaatggaaagagtaaaacttaagcaacaattggaaattttttttgtgtaacaaaagctcccaaatcataccaatactgcagctttgtgcaccaagctagaggaacaaggcagactctcccacacatgcccagggaaacaaataaaagaatgtttgttgcaaagttgtactagcaaaacactgaatgaagcttcaaaatctgtcttgagaagaattgataaattgtggcatattcttacaatagaagaccacagaacagtggaaaattaataaaatgtagctccatatatcaacagaaataaacctcacaaactgtgttaagcataaaaaataaagttccagattgctgtgtacagtgtcaaagcatctatataatgttaaaatatgaaaagtaatactatacattgcttaaggattcatacatatgttataaagttataaaaccatgcttgagaatgataaattcagaacagtgttttgttttttgttttttgtttttaaagaactgaagatcataatggcaaatgttactgtttttaaaagataggatgttaggtccatgggtattgtttgtattttttctgtacatttcagaagagaaaaatgcttatgcaacttcccagtgatttcaaaatatatgtgtgttaaaatgaaatcatattttcaaaagccccgcacaaaagtaaaaactgctctgaaaattaaggattgttcatgaccaggggcagaatggaaacttcttttcttgagcagtttaattctcttggttggaagcagggccaatctgaagctcagtacatcagggtcaagacatccctggagtcctcatgaagaaaactcgtccctgactcagctccaaagctctgagggaaggaacaccaggagggtgtgcggaagggagcgtgtccgcgatgggggtggcagggacggaataaaggggtctttagtgacctataagtccttgcagcctctccccacttgaaccccttggagagggctggaggtaatgtatcacagggcatgcaggggctgtagagaaaaaaaaatcattcattcatgtgtttgtttattcatgtattaatttcacaaatatttattgagcacctactatatggcaggtattctgcttagtctggattcgtggcacagatcagaaataaagcccctactcattacaccccaatgccactttctgggttctaaactctctcccatacccacattcatctttgccactagtcagaacctccaagtcccttgaataggttctattcattgattttagcaatactttccttatgcatccccaaaatatatcatatgaaaactgaaacatgtaacagtgtattgggggactctggagtttgggtctcaacattcataccactaccacaccttggaccccctcctcccatctccagggtcccaaagaatggaatttgaaacctttccacctccagggcactacacaatgcacggatctgaaagactctaggaatcgcaaaaaacatttggagaaaataaagagtgttcccaaccttcccttgaggctggatcactcttgagggccccagtgactttgttgggcttgccctgtaggcctcttgccagcctgtcacccagtaccgaagactaaagcctatcctatgttcacctgtcacaggttccacctcctgcagatgtaggtcactgtgaaactcatcaccagcagcaccctgaggcccaggaggaaaaccacaaagacaagggcaggcatctctgggcctcaatgccaaaggatagaaggagccgtcacgtggaggctctgtgagtttaaaagccctctctgaggtcatgtagtcaagaagttctagagcttgcaggttgcacctgattctgattccaaacccatgtcttctctccacatttagtcctctcttggaaataagagttgaccttgacctgtaagcctcaccttgaatttggctcaaatgctgatttgaatatctgacacatagcagccactgtgcaaggctttagaggcacaaacctaagtataatataatcagctccatgtcccgaaggcctgtggtcatttaatataactttgctaccatcttaagagtttggtatcattaggaccattttctagatgagtaaactgaggttatgggaaggtaatggactcagttgcctaagtttccaaagttgtaactactggaaactaaattttaaaataatcttacctgaattcaaataataggtatcaatagctgacatttattatagaccatacgtaaagtttacatgtattaattcatttaatcttcataaagacaatgaattaggaacatttattagacactatctacagatgaacagactgaagcacacaggggtgaagtgcctgtgcaagaatcaagtggaagaggctgttctatcattggagcagacatcatgcaagcaggttttatgtgcactcaagctcgcctccatataaccgaaacaaatattttaaacaagacagccttgctgacaaccatctgagaagcaccagtagtgagtgcactaagctgaactctctcttgggaattttgaaggagcttgagccaggagatcactctttccacagaaattaaagaacctttcaggatggccagatttaaaggcatccactggccagaaaccattctggttatttaaggaatcacagactctcgagtgggataagacctcattgattatcaagctccccctcctcccagtaccttctgaaatccactcaggatacagaagtgaccccaggtgctcacagaagaagaagtgaacttacctgtgctcccaatgggcttataagcggtgtgggctgctgtggacagtacgaggttagcccgtttgggaggctgtccctcatgttccatcatgcaggtgagcacccgctcaggcccctgcactgatgcattcaccagcagcagcttttccagggtgtaggacctatcattattcttctttaatgtgggttgctcagtgcctttgagtgtatggcagtcctctagccaggcaaggtgcacgttttgtggatagaatctctgcacgaggcaagtaacagccaccaagctggaggaggtggaagactgggacactgtcactgtagggggaactgacaaagcccagagaaagcaaacaattattgtgggaagccatctgtaggtgcctgggagctccctgaggatgaagtcatctgcctagggcctaaccagagcctgccacagaggaatactttaggtattggttaacaaatgcacacataaggaaatgcatgattgaatgacagcgtaaattcatgagtgaatgcatgcctggatggatggatggatggatggatggatggatggatggatggatggatcgatggatagatagatggatgggtgggtggatggatgagcggatggatggatagatggatggatgggtgggtggatggatgagtggatggatggatgggattgaagaaagtcatttaatctttcttttctttttcactttggccattaaagatgaaaagatgaggtatgaattccactgaagaagctacaaatcatttaacttactctatgactagataattttaagatttgaagattcatagactctaagtcttagaatccaagatgttaaaattgtacataggaaggaacttcagattatagagattaagtaacttgcccgagggcacaagtagcaaaggtgggattacaccagagacagtaggttttacctttatgctattctaacacccaaactataaggctataagcatttatgattccaggcttccaaaattatgatctaatgacttctagaattttttcagccacattttcagctatgcaatagaatgtattcacaataaggaaaacaggacaaatttgaagtcctataaaacactaaatatttcaatagacttcttatgaacacacaacacgatgcagctctaacactaaactgagggctgggagatctggattctggtcattgcactgataccatagccaactgcgagacctgtgcaagtcactttccctctgtttctaagactctaaaatcatgaaattctctgaggtcagatcagctctcatgggcctagttaagagagatttcagctcttggtctagggtagaggaagcaactctttctgtagggcaatttgaaggagttacaggaatccaattcccaaatattcttttctcatcctcaacctacccagacttgtaaaagtctatcaatgatgttgctaatggcagctgaggcagacaccctccctgagcttattacctgcacttagtctttccctttcagcacacagggagagcacagggatctcaccaagaaaagagcaaaacctgagaatggaagactccgggtgttgaagccctggtaactggggtggtgcccgtggagaagagggcagggtaaggtgccctccacacaactgtcatgggttctagaaggtgggaaggatcaaaaaaaataaaaaaggataagaggctgagaaggcccatttcaaccgccagtgagttttcctggctgtctggtgtccaggccagtgctgggaggacaaaggcctgagcacggctgatgacaactgctcccatcccctgaaagtcaatgtttgaggcagtgtgcatgcattctcttattcaattctcacaaaaccaaataatgtaaacactgaagctacttggtgtcagaaaaaaaaggtgccacttagaagcagcctatacaaaatcaggcctcaatttcatagaaattgtaaaaaaggaattggttggaacgtcatcttgaaaagcatttaaattttaaaaaatttacttaatttatatttgcatataaatatatagtataattgcaaagaggcaccaactcttataagaataattgttggaagtggacggaagctggcatcattttttttccagaatttatactatagtaccaacaaatccttcatttcaaatctcacatttatagcacaatcattaaagagtaattttgaaaaatcatttgaaattatttgagtgttctatcaattttcataggggcatcttttaatcgaagggctctcttttgaagtgcccacagtatcattagcatcgtgaattttttcttattattatgattccatttttaacactcaaaggctttgcctgtgatccctgcagctccccaatatcacctgcctcaacttcttgaaatacaactttttcaagatctcagtttgcactttgcaatggatatggattctatttgcacaaaatggtgtgaggtttgccacacatcaatcaaggcaagaccaacctcctacagcagagggtttctgggctccacgcctcctctcccagctgcctgacctcagcgcactggtgcaagacagtactactcacaccgagtcccaccttgggcttccaaaaccctttccttttctctgcctcagatttctctgtaaacacgaaatgccacctccccactacaggcacatccccacctctcctccttcatgagacaattctcaggcatagtccacccagttcttcagagggtctccagtgtcattgggccccagttttccacagggccatccagctcaataactcactctttcttggccgaccccctgcaaagctagtatctctctccctgctccctcatcccaacctctcagcatcaccctccaaccacctacccccaagtcctgggttcaggctctgctttcaggggaacccaaataaagatacccacaaagatatttccatgagaggaagcacagccctgagatgcatgcagtgttgagtagggaggggcttggagtgggagctaattttatatgtaatcgatttatttttgaaaatttgtattttctataacttttgcttctcaacaccatcgtcctagctcaggagaattacataataaatactcagataaggaagattccctgaactatcatttctctattttacagacaaaaatactgaggatgggagaacataagcgacttgcagcagatcccacaactggtaaatagagcagagttggaagctggaattcatgccaaggtttctcactcaccggctttacaaccttaagcagccttcacttctttgagcctcagtttccttctgtaacccacaaatggcacaaacagtatagggaagttctatgcattgaagtccattcacatgagtgtgctttactgtctgcgtgctgtaaatgtttgagacattactaccaatattttctgccatgtaacatgatgtgtttacttcccaatagcacaattctccccctgttttgtgaatgagaaaatgaagagagatatagtttgtagattttaaagtccaatatacattcaaggaattaattttactgctatgcaagcttggaccactcacttgccttctctgacttttacagttgtcagaacaatgggatgacggttaagatttcttctaggcatgatactttatgacctcatggaattcacagatctaccaagcattggtccaacccgtctaaagacaccattggccctagaatttagtttcccaagctcttcaaatcttcttcctataaaataatgataataataaaattgaattcccagaagatatcctgtctccattttacagatgaaagaagtgagttctgagaagtgctgtaaataataataataataacaattgccacttctgagtagttagtatgagcaaggcactgtcttacgtgctttacaggtattatttcactaaattcttgcctcaatcaaacaagggatgtgcttgcttatcattgaaggttcttcttcatttttcattgaggaaactgaggctcagagaagtccccaccccaactctgcactacctcagctgagcagagagagagatcttaccctggaggtactggtccaggccagtggttttctggaaaaaccacgtcaacttgtgctccacatggcaaacgacgtgggagaacacatcatcatccatcagcgggacaagcacactgctggtcacattgtaggtgtgtccactgtactggacgctggtctgggggtttgggagctcgtgtttgtttttaagccaggtcacagtaacctggtgtgtcgagaacccagaggatgcataggtcaatcggatccttgtgccaggctcagatcgctgaagggggccttgcaacttgtaaggctggacactctggcctgcaaggatagacccctcccatgagagggcacagaggtgcctgaaccccagtgtgaacaaatacacagcatctgccaagaagcccattgcttcctctttcataagatgtaaaggttatgttctgataggaaccagtttctgaatctgataacggaggccggacagtgaaactgtagcaatgggcaacagcagtttgtaaggaggtcaactcctacagatactgcatagcgaacactcacttggcacctaccctgcctacaggctcttccctaagtcactgagttctcacagcagccctcagaagtgggtgctgttactatccccatttcacagatgaggaaactgaggccaggcaggctaagtaacttgtctaaggtccatcagtcagtggcagagctgggatcttagccaggtagtcaggctccagggtcggcaccccttactgtcactcagccctaccctcagtctttgaaaatggaagaaaacctcatttctcagaggctgggtcatggagaagaggctggaaccatggagaaaaggttaggagcacaggctttaggatctcactcaacccaagtttacatttccactctccactgaagcccaagcaacttaactctctgagcctcagttttttcatctgtaaaatgggggcgattttttttaatagaagaagaatggcttaaattttataacaactattcatcccattttgatatctggagtataattaaattcagacttcctttgtttatttagccattagttttgatgaagtacatttttcttttctttctttttttaaattttattttactttaagttctgggatacatgtacgtaatgtgcaggtttgttgcataggtaaacatgtgccatggtggtttgctgcacctatcaacccgtcacctaggtattaagccccgcatgcattagcttttggtcctgatgctctccttcccctcacctgctgcaacaggcctcggtgtgtgttgttctcctccgtgtgtccatgtgttctcattgttcagctcccacttatgagtgagaacacgtagtgtttgagtttctcttcctgcattagtttgctgaggatgatggcttccagctttatccacatccctgcaaaggacacaatctcattcctttttatggctgcgtagtattccgtggggtatatgtaccacattttatttatccagtctatcaccaatggacatttggattgattccatgtcaaggaatttattttactgctttgctattgtgagtagtgctgcaatgaacatacgcatgtatgtatctttgtaatagaatgatttatattcctttgggtatgtacccagtaatgggatcgctgggtcaaatggtatttctggttctagatccttgaggaatcaccacactgtcttccacaatggttgaactaatttacattgccaccaacagtgtaaaagcgttcctattgctccacagccttgccagcatctgtcatttcttgagtttttaatacttgccattctgactggtgtgagatggtatctaattgtggttttgatttgcatttctctcagagttaattaataaattaagtgatgtaactagtgtagaatatgtagcacacagtaatcactatataaacggtagccctccgcaccatatactcacaatgaccatccaaggaattattattaatcatatttttaatattaacagataaagaaaaggctcagggagggttagtgactcatccaagggcctcacagtgaacagaactgacattgtaacccaggaattctgactccaagccaaggcctttttctgttacatcatagctgcctctacttctgcacagttggctctatattaaccaatgacctttaatattgtcctacttgcagctcagctctgggctaggcactgtggaaactgcaaacagtcactgcagagaacttgctatgggccccattgtccagatgccaagcaggagtcaaggaaaggaatcttaagcagggctctttgaggtgggtataacaattgtcattacaacaatggaaaacttgactcagaaagggagttgcggccaggtgtggtggctcacgcctgtaacccagcactttgggaggccgaggtaggtggatcacctgagttcaggagttcgagaccagcctgaccaacacggtgaaaccccatctctactaaaaatacaaaattagctggccatggtggtgtgtgcctgtaatcccagctacttgggaagctgaggcaggagaatcacttgaacccgagaggcagagattgcagtgaactgaaatcacaccattgcactccagcctgggccataagagcaaaactccatctcaaaaaaagaaagggagttgttttgtcttaggtcacatggctggggacactgatctgtttgactccgacgtttggccacctcgaaacataagagccagtccctgcttcaaggatgtgagagtctaatcacggaagatgggtgtaaatggaataaaaccccaggtcgggggactttgggaacgcccttgtagtttaaatactaattgtgagaactaactggtatggaccgataagaccacacaattcaggaagaaataaatatcagaaatagagcatttaaaattgagatttgagaagagacttgagataacactaagctttgtattctcgggcaggataggaaagaaaaatgcagaaaaacacattgaatttttgaacagacacgcctgcattctaaccccagctatgctgtttggaacctctgagaccttggtccctgtgctagctctgggctctgttgtaggatcagataatgtatttgaggatgcctagtgtgcagtaaatgctctacgggtgtcacccagtaggaacagagacagagtggggagttcgtaacaggtgagggtgctgatgaaggcatttatgggccaggttggggaaggatagctgcaatgctttgttaacaccaaatagaaaggggcctaaatgccagaaaaggaaggggctgcccttccccctgcagaccacggggccccacaaagctgcatagcggagccatataatcaaaaggatgctcccagggggttaatgttgcagcagtgggccagatataccgcatgcaggcaaaagagaaaaataaaagaagaaaaaaccagcatgagtcaataaagaagtatcgtaacttgcttctgatcagaaaggaccagttttgagtttttcagccagacctgtatatcctgctgggtgagtgtttttcttctctctgctggacaacagacaaaaaggcacggggagactgaaagctgagtgggatcattcctcttaagaattcttacagcagccagataagaggccaattccgtcagggagagagagaatgcgaggtggagggccctggtgggaagatgggctgttgttgccggtccggcacccttaccctggcagcggcctgcgctgtaatactccgaggcatccaccctcactgcccccaggggactgtcctttttgacttcacgtggttctggagggctgtgggtccataggctggcttacccctagctcacaaggcccggccgatcctaatgacctccacccaccctctcggacactgagcgcccccaccgcccagccggcccactctgggccagtaattcattctcccgagctcatcccagcctctgggccggtagttcattctcccgagctcatcccagcctctgggccggtagttcattctcccgagctcatcccagcctctgggccggtagttcattctcccgagctcatcccagccgggcggaaggagcgccgcccgcgctctctgggtctgaactgccggccgacagctccctcttgtggagaaaacggtttgaggccgcaaagagtgagcgagagacggaggcagagattccaggcggcaaggcgggccagagaaacgatcagcacggccaacagacgacccacaaaatgggagaaaatattcgcaaagcgcgcatccgacaaaggtcgaagatccacaatctataaggaacttaaataaactaacaagtaaaaaaataacaccattaaaaagtgggcgaaggatgtgaacagctacttttcaaaagaagacacacccgcggtaaacaagcatgtgaaagaatgttcatcgctaatcattaaagaaatgcaaattaaaaccacaatgagataccatcccacaccagccagaatggctattattaaaaagtcaaaaaataacagaggctgtacaccaaactgcccccaacacagtttacctatgtaaaaacctgcacatgggcccagacctaaaaccaaagttaaaaaaataataataagataatataaaaatactcaaaaaagagagaaagtgaagaggacaaggaaaaagagaaggatggaaggagaaggaaagtgagggggaaaaggaaagggaaaggaggaggaggatctgtttgaccccgtgtaagggcctgtcctgaccccatgtaagggtctgtcctgaccccgtgtaagggcctgccctgaccctacgtaaggccgtgcatggaccctcttttccagctgaattcagaattctggcctctgtttaaagttgccatccagaaactttcaactgtgccagtcttgattaatagcctttctagaaggcactttggtgctcagcagtccttaacctctgccatttcttgcagtcaagtgttaaggtggagaactttcaacatcaagaatgcatggaattagggaaggggagtcccaccctttcttcttggggagggtgtggaggaaggcgtgagaagtggagtctgggggcgaatgtgtgagagttgtatcaccagctgcgggtatccttccttccttcaccatcatccaatgccgccctgagtctctgaccctccccagccgtgctgcccacaggggatgtccagaggggctgggccagaggctgtacccacctttcccctgcctgcgcacctgggcttgcagggtgacgttggccttgagtgggggctgctcatcgtggaccacccagcaagcaaactcacgctcctccagcgtggcctctgcctgccacgtgtgctccagagagtatgtcccatctggatttctggtggcctgaggggacgaggggacaccagggtctggatcatgctcctgttctccatccaggtgagtcgcaggtgggcgggatagaagtggaggacgtggcaggtgagattcactctgtcttgcacatgtacatgggtcccagaggtttcagtggtgatcttcagggtggggacaactagacagaggaataggaagtaagacctggtgaaatcagcccctgcctgtggccacccatgcttccctctcccagggaacagcctcaaggtctctcgcctttttttaaagaaatatttttttcttgtatgcgtaatgtaaagcaaatagggctaaatgttaatattcattaaatatgggtaagggtacctgggtgtctgctatattctgtatttttgaaatatttcatatcagaaaatataattttaagaattagtaaaaggtgatgcccatgacgacagggactttattttgctcgttgctgcatccccagcactgagcacagggtctggcatacagtggatattcattattattaaatgaataataaacatttaaaaaaaaaactgtaacaatgacattaatagaacaaagatgtttagaaagggagtctgggaccagataataacaagatcaaacattcgtaagtaagtcactgcatgccaggcactgttatgtgtgttttataaggaataattcatttaatcttcacaggacagctatgaagtaggtcctcatttttttcctgttatataaagaaactggtattaaatagtcaagtaactcacaagatcccacaagttgtaaagtggcacagctaggattaaaacccagacagcgagcccctggaacctgcgcttataaccacaatacacatgatcagaaatccatgaggaatttcatttccccatttatgaaatgaggctttgggcaaaaaccctgaaagctggatgcttccagggttaatgtccaccccacctgactgcccattcacctcagagcacttgggagagattcatggttgttttcaggggctctgccagggccctgtgggtgacttcgcaggtgatctcagatgagacatcctgtcgggtcagtgtcacccatgccttgctggtgatgaagtcattgcctccattgtcaggcaccaggcgctgagctgaggctggatgttcatcactgtccttcaaccacgtaacattgaagtcccgggagaagtcctgggagttgaaggggacagcagtacagttgaaaggcactgagtctccagggcttgtcctgtgagatggaccagtcagagagatgaagggctgtccagctaaggaaagagcaattgtgattgtacactgagagtgggacacaccccacaggcaccagtggcaccagagctgtgtcaggccctgggggcctactatatgctgtgtctgattctgtcttcaggcagcatatcggcatttgatcataagaaaacaagcaaatgcaaatgtgattatgactgatcccagtgccatcaaggaaacccaaagactgcatagatggagaatacagggaggacttattctagaagggcagctggggaagaattacttgaggaggtgacatcattgagctgaaactcaggaatgaataggagccagcaatgggaagggacagaggaaggacattccagacagcggggacagcaggagagaaggacctcaggcaggaagggcttggtgggcttgagaaactgagaagtctgtaggggaccctagtgtcatggcaaagaggtccagagtgagaagagcctggggaccatggtgatgatcttgattctattctgagagtgatgggaaaccagcagagactttaacagaggggcaaagtggtctgatgtacattttttagaggataactggggttgttgtgtggagaatgggaaggagcgtggcaggaatggaagcagggagaccagtggggaagctggtacagacctccaggccaaggtgatggtagcctggactagggtggtgagaaaaggaggctcgagacacatttggaagatacagcccacaggactcagtgatgggcgggatggggggtgagggacagaatgaattctggatcaacaattcccaggttttctctagagcagctgtgtgggtggtagctctactttttgagctgggaagatctggagaaggaccaagttgggataggaagggaatggtgatgaatcaggatttccattgtggatgtaagtttataaggacttgagtgtaaagtcaagaatcaccccaacagggatggttggcccccctactcgggtgcctcccatcaacacttcactagacccccgttgtctgcttgcttacctgcagtgacagggagctgtctccatgagaagcagctccattcaccctcacacccagctaggactatgacaaaatatttcctgcttctgggatataacctgggatctgtctcccagaattttcccaggaaaactgcaggatgagactcacccctccttctaaggacagccttgcagagctctggagcaagaaactccccaagtcttcacagcattccctaagcccctgctctgcaccaggtcaagagctgggtgctgagaccacagagatgagtcagacaggacccccacccttgagaagcatctggtcagatgggggtgaaaggcaaataaacaaccaatgacaagcaggatgacaggcagagggcagcgcaggaggccataggaacttgtcctcttagcacacagctctggtaccttctggactgtgctctgccctcatcacccaccctgcacacagcaccgtgtggttcagaaaacattttcagccatgtgtgcttcttttcttccacatctcagctgtgggaggctggtattattgtcctcactttccagaaaaggaaacagagattcagaaaggtctcgtgacttgctcaaggtcacacagcctatcagtgactaaagagggagggtaagaaggcctgtctgactttgggtccaggactcttccatgcctccaatgccggaggctccatcactctggcgacttctctctctctcttttttttctctctctctctttctttctctcgctctgtcttttccacccttacaccctctctgacccagaacaggtagccacccagactagagctgacatcgggaaaactgggaggtgggctcctcttttaccccctgacctcccccgagcccctcacccttaggtcacttcctcttctgacccccaagctcccaccagctccctttgtccgcaaggtctacattgaagaaaagatgcaaaacagcacctgactggcaggaaaacagctcagtcacctcctctgagcctcagtcttccttcagaaagacacagtggctggatttggtcattcctgggggtctccttgcctgccctgagggtctctctgggcaggaatcaggactcacctgtgagtcccagcagaagggtgggcaggagggagcccagggcccgcccaggtgtggtagccatggtgagagactcacagtgctcctggtctgttcctggtggcaaccactggataaggccctgaaagagcccaggagccactgaccagcctctgacagcctggagcaggccttatacttcccagctgcctaccccaccccattctctgccatgcctggaacagaggcctgagccacagtgagggaagtggtcactgtggccacggcctccttccaagctgcaaaccttcaggcctgaggtgtctaaccagggaggcatctggagccttttaatgggttccgactgtccctgattccccatgagcaaaaccagaaagcggctgagctctgcctcaagcttcaagccacagagctggcctctgataggctgagccttgatgtcccttgtcctggaggctcctccatgctgaacaagcagcatcaagagcctgccctgtcccaggcccagacacggcttctgggaatgcagaatggatcagatatgggcccagagggttgagaagtgagccttgacatacacaaccacgtgcaaccaagaaagaccctagactttgaaacccaacccttgcctcacagcttaactgggcttggacaatggtggcacggatttcccatggcccagaactgtctactaggctccacgttggggaaacatgagtttgaaacacagccaccagtttccctgacctccctatgaaaacaacctctccctttggtctctctccatttccttaccctacgttactgggctttccaatggttagccctgatgtatattactcgtttttatccatttccctcatgaaaaacaaatgatttgccctgaagactactgctttttgttcatggctgtaaccagcagccacacagtgctgggcacagaatagatactcgctaataacaaatgaacctttggggccaggtatgttctcaagactgattacaaagcagccaagcccagcctgctccccagccatcccatctctttggggtctgtacgctcagctaaagtggagggagaggctagagaggagttttctagcctgggtgaggctgttatggaaactcccctgacctcacaaccccccaccactactcagccaagcaaggcaccccaaaatgactcctagatattacgtgcctgcaggaggaggaggctggcttttctttttccaggtgtctcctgaagcaacagtggatttgctgatccaccttgatgttgccctgagcaggagaaaaaggaactgaaaagagacagcagggtagagtgacggggtggcagggcagcagctcaagcttcctccatgcagagtggcaagggggtgaggtccatggagagaccctcattgaaaggggggagccgaccttagagcatcccactcaagagagatgaccactggcaagagggcctaggagtaagagactgcagcatggactccagcggggagctgtgaacctggatcagatcatgcataaaagagactgtgcagcagactgtgtacccccacagcatacacacatgggcacacacacgtgcacatgcatgcacacatgcacacattcaggatcctcctaggaatccacacctgtgccctaggaggcagctggcttccagagtccagccatagtgaacagagcattgctgggtaaaagaagtccctctttttccatctcccttcccaggccctaacacaccagatgatagacagacccaattcagggaaaggaggagggacaaaagaatgcttcacctccatcccttccagatccctcagcagggacttggaggcagcagtgggctggggtgagagaaggaagtggacgctgaactagatgtaatgttggcattttcaaccagactagtttggactgggcagggcctgacacagaatagttactttataaagtttggtaaaattattcatctaccctcagttccttggtgacactagccacatttcagacactcaatagtcacgtgtggctactggctaccatagtcgacagtgaggtcttgggtgaaacattcttcatcagggaagtcttttctaccctaatgtctccctgtgggttcaaatacttctcttgcagagcatttatcacagttataattaaactgttaacttgaaactagttgcataataactctttcccttattagactgtaggctctggaggacagggaccatgtccttggtcactagtgtaaataagtgccggatgaatgtttgttggatggatggatgggtgggtggatggatggatgggtggatggatgggtggatccatggataaacagactaagaggaaggtatgtgctacagggcaagggacagaaggaagcaatcccactgagaaagcagagaagccttcctggaggaagtgggcttccttcagggctcctgtctcagccctccagcttaatcacaccatctacacagaaggagaagactggcaacactagggctaagctgcagtgggtgggcagccatgggcagcctgccttgtggggctggaaggctgaaggggaagtggagaagatgaggttctccaaggagtggcctgaggaatgccaaagtacccacagggctagcccaggctgggccatgcgtccactgggtaaggcttggcttcctctgagtagagtcacgtcagtctccttccttattctagcaccggcaagaactggctgtcacgtactctataagcacaaccttttataggagctggggacccaagagccctcatcatgaatatgggcccctgtgctggcctaacaggctgagggcccagagaggacagagagttgctagctcttcagaaaagggacactgggccaggtgcagtggctcatgcctgtaatcccagcattttgggaggccaaggaaggcggatcatgaggtcaggagttcgagaccagcctgaccaacatggagaaaccctgtctctactaaaaatacaaaaattagctgtgcgcggaggcatgcgcctgtaatcctagttactcaggaggctgaggcaagagaatcgcttgaacccaggaggcaaaggttgcagtgagctgagatcgcgccagtgcactccagcctggggacagagagagactctgtctcaaaaaaaaaaaaaaaaaaaggacatcaatgaccctaaaatccaactccttgctgcaaggacccatggatcttttaccctcaccccatcttcttagacttacccttgacaagctgcacatgtcactctgagcctcctgcgaacacaagtccgtgtctccccaagacgatgatcagcctccttgaggacaggaacccttccttgtccacttgctccatgtctgagacctcagtgcctcacacagcccctaacactgaatagcccctgaacatgcatgtgttaaataaatgtgtttcgttattgatttacttattcctgcaattctttatagagtgtcaattatgtggcaggcatcatttggggcactgagcaagtgagcagtgagcaagatagtaaaaataaaggaatacctaggcagtataattccagggaggttaactggtatgaagaaaaagaagtcaggggatagacagtagctgcgtatattttggaccgtgtgcacaggaagccttctctggggaggggcctatgagctgagacctgaatgaaggaagtggaagtcatagggagttctaggagaagaatgttccagagagaggaatacacttgcagggcaggcatgagctgggcatatgtgagccacagcaaggtcactgtggtgggagcagagtgagggaacagatggtcatgggagaaactgcaggacttgatcttggaggctgtgctgatgaggttagagtgtaatctgtgtgcagtgccttgggcagagagcagtaccggagcaggatccaggtcacagattggaaactcacactctggtggctgtgtgtatgtgtgtgttggaggagggacaggctggaggtgggtaaggaaggaagcaggggagaagaggaagcaagaggccactgcagttagggatggctggacacaggactctggagctgggggagagataggtgatggagatgggggatagatatttgcaagctgtcaacatgtggatggtttccacatggacattgcataggatgagaccacctcaggaaagaagagattgggggagagggagagggggaaggagagtcccagggctgggattctgatctggctctgccaccaatttgcagggtcagcttgggccatctctctgggctttgggttctacaactggacatgaagggaactgagccaggtgatctctaaggatccttcttctttgaatattcacaggcttggtttcatttcctgtacccaggagttttagtctgggccggggctccactcaccccactgctgagcctgctggctatctgatccctgcattgcacagggccccactctgagaggaacccgcacttgatttactgctctgctgttactgttttgaaacgtttaattattctgggacatgctctgctaattatgtggccagtgctaccatgtgccgttggtctactgctgtgaggtgaggcaggagcacgatttggctgttgggaggtccctcaggttgttgggtgccaggactgagggcccttgctggacccctctgaggactccccagtccctgctgtcaccaacgccaccctcccaatgcctccccagactctgcaatcccagaaagacaaccttggcattcctgaacttccttttcctctttccttcagaagctgaacaaatagtcaagggcaaataccaaaaccgtggaattctgatatagaccaggatttccgaagatatgagccatggactgacatgcagacacagtcctaccccagatgtagaatcctacagaggtcctaaaatctgcagttaaacaaactaaacaaaacagcattctgactgagttaaaacttgagaactgctgatttaagctagtgacccagatgagttcaggaagatgacttgatgggggcattgatgctgcctggattgggggctggggagaaggagggaagccagggagagatgaactactcagccatatgctccttgtccttcaggtctcagctcaaatgtccgcccccaggaggccttcccttgactccagcacacagtgagctgagaccctgctccaagctccctcaactcctgaccttagcagagcaccttcttaccattggtgattgtcactactgctagactgcgtgcaccgtggaggccaggaatggggactctcttggtctccatggtatccgcaacacctagcacaaggtgtagcacacagaagatgctcaacaaatacttgttcgatgaatgaatgaagagagagtttggatgtatagggccaagggaatctttcagtcctaggaatctgacacttaccttggagtgaaggctggttactgcctcttgcctgaggagaccctatagagggctagcattagaattcccctctcctggctgatcttagagtgatggaagagactggcaggggaaaatttagactaaggtgttaaaggctaacataccatttcacccttcaatattggttgtgatttccaaaatgctatttgctaaccccactgagcatctcactgggaagatccaagccattgaggaaagaaaacaagcaaaagagatttaagggttaaagaaaccctcttttgatattttacatagtcccaacaaacttctctgctgcaggagatgaagacttcagccactacaggtggactggccccagtgacccctgtctccatgagagcaagcagatataataatgggagatgatggtgaagatcaatgccttaaacccgaagaatggctttaatggtggacttttaggctgtcagcacttaggtggggcacatctgtaggaagaggagaagaaaagaaaactcaatgagatgaggtgatttgcttgataacttacagagagaccagcaagctagataggaacaactaagaccaataaggaagttataagaggctcatttctgcttaagagaaggaagaactttctaacaataaatgctgtccagtaacaaaactgtttatcttttgggggaacttcctttcatcagggaagtataagtatagaactccagttagagatgctggacaaggagtctaattcgactagataagtgattttcaaaccataggtcacaatgccttcatggggcatgaaatcgatttagcggacctaaactagcaattttttttaacggaaaagatagaagagagaggaaagaaaagaaggaaaggaggagaagggaaaagttagaagatagaaggggaggtgaggcgaggaaagagaaaagaagaggaattatgtgagtttatcccacataggaaaggcaagaactgtccactgaaactttcggggtgtgtgtgtgtgcgcgtccgtgtttgtgtgtgtgtgtgcgcgtgtgtgcactcactaggtggcaatataaagtatattactaagtgtgggtgatagtcaaaaagattgaacacctccggaagttgatctctaagatccttcaaactttgcagttatgtgacatgaggtccttaggttttatgtatcaaattatgagaataggattctaagatccatttatttcattttttattcatttactccacatttatttaatacctattttaagccatactgggtgctaggggcaaagagatacatcagaatcagtatcagttcctgccctcaagatatggagatgaacatttacacagatcattataatacagtgtagtatatgcttcagtaagcatttggctaagatttatgcacctttcacccagccccctgtgcaaactgattttcttatctccattttacagatggaaaaaaaatcaaagctcaaatggtcacacaaagggtgaatcaaggtccacccagcagaaccagaatttgaacctaagaccaccaggagagcctgaatttctaaccgttgggctccactggggtgtgaagggcaggtgggtgggatatggaggctcagagaaggaaggctggctgcagcagctgggggtggggtggggaagaggccagggaaggcttcatagacaagggatcattgagctatgtcttgaaggaagaggagttggatggcttgacaagggggcaaaggtgtcaccttccatacaaccagcagaagccgctcgaagaatagtaaaaattgtgggatgtacagcaggcagacctggtgcgaattttagttccagcttttactacctgtgtgaccctggacacgtcacctaacccctctaaacttccatttcttcatgcattacatgggagttattatgaaatgagagattacgcacccaatgcatccagcattagcacagtgcctggaaaataatagaagcctcatgctaattacaacctatttatgacagtttgctgcctatcagctgagtaaccttgagcaaactgctaacctctctgtgcctcacttccctcatctttaaaatgggaatcataatagcacctatcacataaggttatgaaaataaaatgaatacacgtgacatgcttagaagagtatgaggcaaaaatcaggtggatgatagaggtaggtcactgttaatacttctgtgtgctacacaccgtgcagagagttttaccattttatttattcattaggttaacaaatgatcattgagggtttgctaggttccaggcaatattcaaggtgcagcagagaatacgaagtaggttaggacaaggctgcagccctgggtggaatttgtttgctggggagtgggagggagaataggatttgggcaggaggtgagataagtggtgagaaatgaggctggagagatggaacgggtcagagcataaaaatcgttttatgtcatgtcgtcctataaatagtggtgagtccacggagattttcaatctgggggacttttcttcttagaatttacgattctccagttgtaaaactctatgactctacgtgccaaagtctttttgattccaagattatagtcctatggttttgtgacttttaatatttcttacttgctgtagtagattgatattaaaagtccccacagtggggacttttggtttcaactctgacatgcaaagaacttggaagtcgttactcctgaccttacaacaagaaaatgctggatatgctgaaaatcaatgactttccttgagcccattagaaaactgaggttgcagagcaaactaccacctaaaaatctggagaatcagatgagtccagatagatgtgagcccaaagttctgcttccctgcagcaaggcctaagtcagccagtgggaatgcttacacagtaattctgatgaattgccaaggctacgtgcagactagcatgggagggagaagcatgagagggaagacctcacactcttgcaggtttttcctccagaaagctcaccaagttccaatgagaaaggtccccacgtggcccgagcagggagatgcaatgaaagctatggtgaaaccctcccaggatctcttccctcattgccagagggaaggactttggcagagggcacttctgaaactctatcttagctaggctaaaggagctctgcatcactccaggcctctccagacttcctgtcccatctagggaggaaaaaagtggtggcaggggagggagctctacccctgcaggaagaagaaaaacacttctaaagtccacactcctgaagcaagaggccccagattgagacttaattagaggattagggaatgccctccgtcccccacactctagcacataccaataaggctccagtagagtacagtgacttacagctacaagacacagactctctgaggagctgtataaaggaaagctccagagccaagagaggagaaaataaggacattaaatgaattggaagtccctggtgcctataactacaacaagcattaaatgctgcccaactcctagctagattaacatcaatcctcacactaaaggtctatttacctcagtgtttattttcttattcaacatgtccagctttcagcaaaaatttacaaagcaagctatagaggctgagcatccctaatctgaaaatctgaaatttgaaatgctccaaaatctgaaagtttttgagggccaacatgacaacacaagtggaaaattctacacctgatctcatgggatggtctgcaggcaaaacacagtcaaaaatttgtttcatgcacaaaatttttaaaatactgtatagcttgttgcattggcatgcacctgtagtcccagctacttaggaggctagggcaggaggattgcttgatcccagcagttcaaggccagcctgggcaacataacaacactccatctctatatatattttacacacacacacacacacacacacacacacacacagagtatatgtgtgtattttatacacatagtataaaattatacactataattttatatgcatagtacatagtattagtccattttcatgctgctgataaagatatacccaagactgggcaatttacaaaagaaagaagtttaattggacttacagttccacgtggctggggaagcctcacaatcatggtggaaggcaaggagaagcaagtcatgtcttacatggatggcagcaggcagagagagctctcacagggaaactccccttgttaaaaccatcagatctcatgagatttattcactatcacgagaacagcatgggaaagacctgcccccataattcaattacctcctactaggtacctcccacaacacgtgggaattcaagacgagatttggggtgtgggtgggacacagccaaaccatatcacatagtataaaattatcttcaggctatgtgtgtaaggtgtgtatgaaacataaatgaattttgtgtttagacttgggtcccacctccaagatatgtcattatgtatatgcagacatgcccaaataaaaaaaaataaaatctagaacacttgtggtcctaaatattttaggcaagacatactcaatctgtgttagttccccaaggctgctgtaacaaattaggacagggtgggtggctaaaaacaacagaattttattctgttaatgttctggaggccagaaatccaaaattagaatcactgggccgataccaaggtgttggcggggctgtgctccctcttaaggctctataagggagaatcccttccttgcctctcccagcttctagtagctgctggcattccttggtttgtagccaaatcactccaatctcttcctgtctggtcatgtcacctcctcctcttctgtgtatcaaatctccctctgtctccctcttatatggagacatgtagaaagaagtacaaagtaggaggactcacactctcaatttcaaaacttaggataaagctatagtaattaacacagtatgataatgacataaggttatataaaccaatatatagacatatagaccagtgcaatagaattgaaagtccagaaataaccccataaagtatagggccagggtgttaagtccagtcagtgtggaaagaatagcctcttcaacaggttgtgctgagacaacaggatgtccatgaacaaaagaaatgaagttggattcctacatcactccatatgtaaaaattgacccaaaatccatcagagcctgaatgtaaaagctaaaatcataaaattattagaagaaagcatagttgtaaaccttcacaaccttggatttggcaggggttgcaaaagcatgagcaataaaagaacaaataaattaattaaaattaaaaactttggtgcatccaatgttatcatcaagagagtgaaaagacaacctatgcgatgggagaaaatacttgcaaattatatatctaataatataattattagaatatattaagagctcctacaactcaacaattaaagagacaaacaacccaattaaaaaatgggaagaggacttgaataagcattttcccggagaagatacacaaatgtccaataagcacaagaaaatatgctcaacatcattagtaatttaggaaacacaaaatcaaaaccacttcatacctaagaggatggctatttacaaataacaactaaaaaaaaaaaaaaagaaatggcaatgatgtggagagattggaacccttgttcactgatagtgagaaagtaaaagggtgcggccactgtagaaaagttttccagtttctcaaaaagctaaacatagaattgcatatgatccagcaattccactcctagctttacagtgcaaagaattgaaaacagggactatgatgcttgcatgccaatgttcattgcaacattcttcacaatagccaaaagatgttttggctgtcgtgaaaaatcaagtgtccatcaacagaaaaattactcaacaaaatgtggtatatacatatcatagaatattattcagccatagaaaagaataaagttctgatagatgctgcaaaaggatcaatctcgtaaacattattatgttaagtgaaataaggctgatacaaaaggacaaaacgtgtataagtccacttatatgaaatccgctttgtgcatctgctttgttaaacagtttggtgattctttgatatgctaaatatacagttaccatatgactcaacaattccacttttaggtatttacctaagggatttgaaaacatatatccacacaaaaactcatacatcaatgttcatagcagctttgttcatcagagccaaaagatgaaaataaccctaatgtccatcaactgattaaaaaaatgggatgatgcaataaaatatgacatcatacaatggaatattatccagtcataaaaaggaatgaagtagtgatacatggccgcagtagcacgcacctatagtcccagctacagaggaggctggggcaggaggattgcttggatgaacatggatgaactctgaaaacattataccaagtgaaaaaagccagacacaatatagaatcacattatatgattccatttatatgaaatgtccagaacaggaaaattcatagagacataaagtagattggtggttgccaggttctccagggagggggaatgggaagtaattgctaacgggtgtgcatttctttgtagggtaattatatgtttctggaattcttgttgataatttcacatcttttttttttcttttttgagatggtgtcttgctctgttgcccaggctgaagtgcagtggcatgatctcagctcactgcaacctctgcctcctgggttcaagcaattgattctcttgcctcagcctcctgagtagctgggactacaggcacccaccaccaagcctggctaatttttgtatttttagtagagacagggtttcaccatgttggtcagacctcaagtgatccacctgccttggcctcccaaagttctgggattacaggcataagccgctgtgcccagcgataatttcacatctttgtgaatacactaatcagcacagaactgtacacttgggaagggtgaattttatggtatgtgaactatatctcaattttttaagtaaggggatagtatactcacactaatcaaaaggatactggagtagctattaatatattcattttagacaaagcggactttagaataagaaagagtatcagaactaatgagggtcattctataattataaaggagtcaattatccaagtagtcataatcatcttaagctcctaacaacaagtgtcaaaattcatgacatgaaatagacagaactgaaaagagaaataggcaaatccacaattacagttggagacttcaatacccctctttcagtaattaatagatcaaacaggcagaaaatcagtaaggatacagatgacctgcacagcactattaattaacttgatctaattaacatttatagagtatttcatccaataacagcggaatgcacattcttctcaaacactcatggaatgttcaccaagacagaccacattcaggaccatcaaacacaccttcacaaattaaaaagaatagaaatcatacaaattacgttcttagatcacaaaggaattaaactagaaatcaaaaacagaaagctgactatagtaggaaattaaacagtacacctttaaataaaccatggttcaaaaaagaagtctcaagagaaattagaaaatattttgaactaaatgaaaataaaaattagaaaactttgtgttatttagctaatgtagtgcataaaaggaaatttatagcatccaatgtgtgttagaaaagaagaaattccagaatcagtagcctaaacttctaccttagtaaactaaataaagaatggaaagttaaaattgagacaataggagaaagaaaataataaaaattagagcagaaatcagtgatattaaaaacagaaaaacaatagagaaaagcaataaaagccaaaagctagttctttataaatattaataaaattgataagcccctagccacgctaaccaaggaaaagcaagtgagaagacacaaattactaacactgaggaaaaaagaggggtcattaccattgatcccacagaaactgaaacgatgatgagttgttactgtggacaaccctattcccataaatttgataatttagatcaaattagccaattccttgaaagacacaaactaccaaaacttacttaaggagaaccagagataacttagattgttctatgcctattaaaccaattcatttggtagttaaaatccatctataaaaggaaataacagaacaatacggtttcattgatgaaatctgccaaacatttaaggaagaagtaataccaattttatataatatcttccagaagacaaaagagaaaggaacacttcccaactcattttatgaggttagaattactctaatgccaaaatcagataaagacattaaaagaaaaaagagctacaaatatctctcataaacataactgtaaaaatccttaataaagtatcaacaaattggatccagcaatatttaagaaggataataatatatcacaattaaatgaggttcattccaggaagagaaggccagatcaatatttataaatcaatcaatgtgtaatacatcatattaatagactaagaaaagcatatgatcgcatcaatatatacacaaaaagcatttgacaaagtgcattgctcattcaagattttaaaactccaaaaatattaagaatataagggaaatttcttaacctaataaggatatatacaagaaaccaatatgtagcatcatatttaatgtaaatgaatgaatgttttcctaataaaattgagaaaaagataaggatgccctcccacatcatttctcttcaccatcatactggaagtcctaggtactgctaggaaatgaaataaatagtatacagtttgaaaaggaaggaacaaaactgtctttattcatgtatgatgtggctgtctacatagaaaatcccaaaagatctaccaaacaaacaaaagaaaaacttctggaacaaataagagaatttagcaaggtcataggacacaagattaatatacaaaagtcaattaccttcttatatgccagtaataaacaaatagaattgtaaatttaataaactaaataccttttgaaatagcatcccccaagatgaactactgagatataaatcaaacaaaatatatacagcatctgtatgcagagaactaaaaaacaaaaacaaaagaaatcaaagatctaaatcatggagagaatgaagagacaactatggaatggaagaacatcctgcatttataaaccatacatctcataaggggttaatattcaaaacgtataagaaactcaaacaactaaatagcctggccaacgtggcaaaaccccctctctatgaaaaatatccaaaaattagccaggcatggtggtacacgcttgtaattccagctactttgcaagctgactcacgagaatcatttgaagcctggaggtggaggttgaagtgagcagagatcgtgccactgcactccagcctgggcaacagagcgagactctgtctcaaaagaaaaaaaaaaaaaaaaaaaaaatttttttttttacatgggatggcaaagtacagaacagccaacaatattgtgaaaaacaaccaagttggaggactcacactgcccgattttaagacttactataaaactacagtaatcaaagacagtgtggtcaaaaatacagacacatagatcaatggaacagaatggaaggcccagaaagctatccacacaaatacagtcaactcatttttgacaaagatgctggaacagttagatgtttatagacaaagaaaaaaatccttaacataggccttacagcttacatgaaaattaatatgaagtcaaaatagatcatagacttaacatataacacaaaacaataaaactgctagaagaaagcataggagaaatctacttgactttggatgtgctgactagtttttagatacaataccaaaaacataattttaaaagattgatagttgaactttattaaactttagctctataaaaggcactgttggccaggtgtggtggtttaggcctgcaatcccagcactttgggaggctgagtcatgcgcataatcacttgaggtcaggagttcgagaccagcctggctaacatggtgaaaccccaactctactaaaaaaacacaaaaattagctgggcgtggtagcacgtgcctgtagacccagctacttaggaggatgaggcaggagaatcacttgcacccgggaggtggaggctgcagtgagctgagatcccaccattgccctccattggaggctgaggtggaaggattgcttgaattcaggtgttcaagaccagcctggacaacatagcaagaccccgcctctaaaaaaaaattagctgggcattgtagaatacctgtagtcccacctattcaggagactgtggtaggaggattgttggagcccaagagtttgaggctacagtgagctatgattatgccactgcattccaacctgggtgacagaacaagaccctgtcactaaaaagaaaaaaaaaaaaggatgaaaagataagacacaggatgggagtaaatatttgcaaatcacatagctaatgaaagattgtattagtcagggcttctcagagaatcagaacttttaattccaaaggccaggggcctgaggggagggtaccagctattataggacccagagtttgaagacctaagaaccaggagaactctgatgtcgaagaagaaaagaaggatgctcagctcaaggaaagagagagaatttgcactctctctgcctttctgatctattcagaccctcaatggattagataatgtccatctacattgctgagggcaaagttctttacctagtgtactgattcaaatgctaatctcatccggaaacaatctcacagacacaccaagaaatagttttaccagctatctgggcatcccttgtgatagcccagagaagttgacacataaaattaaccatcccaaagatcatatccagaatatgcaaacaatgtctaaaactcaacaataagaaagcaaacatctacattaaaaaatgggcacaagatatgaacagacatctcaccaaagaatgtatacaaatggcaaataagcatttgaagaaatgatcattcgtcattatagaaatgcaaattaaaacaactactacacacctataaaaatagctaaattacaaccaactggcaataccagtgctgatgaagatgcagagcaacagaaactgtcactcattgctagtgggaatgaaaaatggtactttggaagtacggtttggaagtttggcagtttcttataaagttaaacattgatttaccatacaatctagaaattatgtccctaggtatttactcaactgataaggaatcttatgtctacacaaaaacctgcacacaatgtttatagcagctttattcataataaagccagatgcaactaagatgtcctttaataggtgaatggataaacaaacagtggaacagtcatactatggaacattattcggagataaaaggaactgttaattcacacaacaatatggatgaatcttaagtgcatattgctaaatgaaagaagccagtttccaaatgttttatatatatatatatgtgtgtgtgtgtgtgtgtgtgtgtgcgtgtgtatatacatatatacatatacgtatatatatatatgataattccgtttatatgatttctttaaaaaagcaaatgatagagatgggaaatagatcagtggttgccagaggactgagaagaaggagacaggtggctaagtgaagcacagtggatattttacagccatgaaactattctgtgtggtactgtagtgattgatatatctgctaagggcttgatatctagaacatataaagaggtcctacactatccatttgtcactatgcatttgtcaaaaccatagaattttacagcacaaaaagtaaaccttggccgggcgcggtggctcacacctgtaatcccagcactttgggaggccgaggcaagtggatcacctgaggtcgggagttcgagagcagcctgaccaacatggagaaaccccatctctactaaaaatacaaaattagctgggtgtggtggtgcatgcctgcaatcccagctactcgggcggctgaggaggagaatcgcttgaacccgggaggcggaggttccggtgagccaagattgcgccattgcgcgaccttgcaacaagagggaaactacatctcaaaaaaaaaaaaaaaaaaagtaaaccttaatgtatgccaatttttaaaaatctactaggaggatggggaatcacaggataaaatgcagatgatggcaacagaatctaattgtattacaaacgtacgagggatctcattgaagggcatggagactagaggtgctgacctaaacaactttggaaatgactggaaacaagaagactcaagatgaaaagagctgtccataagcactgccctccagttggtagagctgtgtctcacaggggtatggtttgacaattctgaaaccccagtacatgtgtactaacattgaacaattaagtaaatggatggcagatggtaggagccaggtttttcactgctgaagtgggaggttatagataagcaaagggagaaggatagaatgaactgtatgaatgtgttagagtcagagacggtagcatgagctcatgtttaacttaatatagataccaatgatagatacagaatcattacagttatgtgaatacacgggctaggatacatacatgtatttcctagctctgccccctggtagtgggtccccaatagcaacatgcaaacccaccatccagatctgtttctaagaacattctccagtgaaaggaaccgggctccctggagaaacggctgattctagggctgggaagaaaatatgcaagatgagtctggagcagctttagtgccagaaagtaaggaagggctcaaaaacataacaaaaaattatggcaaagggaaacaggagccaatagagagagctcccaggcgccaaaactggaacaatttaagcaacaatataaataacatagtattggattataatgaaaagtacaaaataaatatccatgagtgcacacggatagaataaatgactgaataaaccagtagcagaagaattccaaataacttattacatactgccccctcaaggaagtgaagcataactccccatcccttaagtggaggctgtgcatagcggctattctgtgaggctattctcattattagactggggttattattagactggtttgggggaggaaaaccacagaggtacagtgtcattctcaaaaagttatatcaagagaatatgctatcaatatcaatatcacttaatgtcaaccctgatggcctagttaattatttgatcagtcttctgttgaaattattgttgttgttaattattattgttgttaattatttgatcagtcttctgttgatgagccttgaggcttgaggtaacgtctgtcaggtaatggcaaaggtaatgtttatatccaaaggtaatgttatcaccataatgctaactataacattataaatatatttttaaatggccacaatacctcagggcccttgcatcatactctgccgtgtgactttgctgctcctccctgggagaagtgatttctatttccccacctcttgaatctgggctggcttgtgacatgtttgcaccaacagaatgtaatggatgtaaattcacaccagttatacagtctcaggaggcactgcatgttatcagatgttgacggacacatagcctgaacacccctctaaccctagctgatagccagtcaactaccagacatgtgatttagaccatcctaaataaaccagccccagctgacccaccctttctgatcccagacacaaggagcaaatgcaaagttagctgagcttggcccagatcagcagtgctacccagctgacccacatgagcaataccaaaagctttctatttaaagccactgaatttcggagtggtttgttataccgcaatagctatgtgcctcactggcacctaggcataacaatgcatgtaggtgcttatttgttgtaacacactgtgattacagaagattagaagcagcctcaaggctcatcaatagaacactgatcaaataattacaggagagccaaacaatggaatattatgcagctgttcaaaagaacgaggcagccctatgtgaatcaacatggaacaaactccatgatgcatttttaagcgaagcagcaagaggcagaagagtatacagagcaagctactattgatcctgtaaaatacttgcatttgcatggactgtctccgggtgggtacacagaaacatgtaacaatggctgtctctaggaaggggaactgggtgcctggggaacaagagtggaagcgagacttccttttcacgctatcctcttttttatcttttgaatcgtgtaaatgtgttatccattcaaaaataaataaaaccagaatgtaaaaactcctatgcctttcaaatgcagagagccttattattctctttccaagactcccaagatccaccgggaccaaaaaacagcagtcagggaacaattccgattttccctcctctctcccccacagcccccacccgcgcagagcgaagctggcttctccggtaaacccctgcttgtgagttgcgcccaggcgacactacctcgcctgccaccggagggcagcgcgaggcttccttcccggggaggaactgcggcgagacggtggtcggccctgaatagcaagctggctcctagatcaaaggctctggcattccgtttttgcgtgcatgtttgtttgttttctttctttcttcttcctcttctttatttttttaaaggtctcgacccaagaaccccattccaggcagtaggttcgccagccattgcttgtgcgtcttcgcggagagagaggggggagatgccccggcgctccttacccggctggataagaccctttggggaacttgctgcttcgcaagtcttacttgtgaggacccggagggtttgcctttgaccccgcctgtgaccttaagaaaacccctttctaccctgcgcctgtcccacagctggaagtgataattttaagaatgaattaagcactcggtgtgtgacactgcggcactaagcactttctggactgtgttaggccccattttacagacggggaagctgaggcctccagaggcggagtaacctgctcatggttacaaagctggtcagcggcgggcaggatttgaatccagggttcccggttcctaatcctctgcttttaccacttaatttatcctgcctccaagggctgctgggaaaaaggcggatttcaaaggagaagcagctaaggaaaagctctggaaagggccaacggagcggatattcccggagcccctctgcgagccacgcgcccctctgggaagcccgcttccccctgcagacaggcgctgtgacacgcttgcgccccggtcgaacaggcgaagaggccgaggcccagagcggcgcagggcgagcctggaggctgcgccccagacctggaccagccacggacgccgctcccgccgctccctccgctccgctgcgctccgcacgctggcgccggctccccgaggccccgggcgccccggccgcacgcctgggtaaaaggtcccgaggagtccgcagaagcgcgcccacgcccgagacggccgtttccgccggcctgggaaaggggcggagaagggggtcgcccgggccgcagcgtgccggtccccgccggccgagccgtgtttggggccagtccccgcaccccgcttcttccccacctggggagcggggcgccgcggtaggggcactggagcgcacgatgcaccccgccaacgagtcctttctgcagacggggttcctgttttcatgcaaatgcctttgttagcgcaccgggaaccagggggacggaactgcagctgacgcgggctgcgcgccgcttttccgccttcgcttgattcggcctcaacgacttaaacgcgccgggaacaaaaacgccggcgccgcggaaaccctcaggagcggcacgagaagcgcggctccgctggggtccgcgagaagcggtgcgggcggccgggctggtgcctgcaggccctctcaccgcatcaccaagggcaaggaacctccaactgtccctcagtttctctacctgcactgggatgtcctacataaggagtcagctcagtgcccgcatcttgctgtaattattttgtccaagcactgtgggaggcagcgttgaggaggctgttgtggggagtttgcctgtcagagagaagagggaaataaacaagaaacatacagacaaaataatttcaaatagcaacaagtgttaatatcgtagcaaacaccaatgcagcgcttatgccaggctctgctctatgctatatgcacattaggtcatgtaatcctcactcccttgtacagataggaaaatgctggttgaataatctattgaagggaaataggaagttgaacaatatgtggagaaacaggttgcacgataggtggagaaacaacaggttgcacgatatgtggggaaccaggttgaacaatagcctcaagtgcgcagtaggtaggctcggcacttgagaatattgggcccagcctgggtttcgacccagccagtccagccccaagtggaagcttttgcacactccattacaccagttttggctgtactaggaaggatgtaaagtggtgacacgcccaagagagagctggggctagacaggagctgctcctaaaaggatgtcaatggacgtctctgtgcaagagagtaagctgaggcctgcacagtgagaggaactagccatgcaaagagctgggcgtgtccagcagagaaaacagcaagggcaaaggccttgaggtgggagagtagatgtggggtttcatgaacataaggatggaactcagtgagcagtagtaaggagactggagatggtcagcagctgggggtagcaggctttgcaggtctcggcaaggagctggacttttattctaggtgtgatgggaagttgtgttgttatggccactgaaggagttgcgtggatggagttggaccagagggtgggtgcccttcctgccttgccagccttaggttcaaggaggaagttgattgcttaggccttaagcttgcccctcctcatctgacctcctggcttctaggacattcctgaggacgtacaccaagtctccaacattacctgatgtcagatcaggtaagccctcatcttatagatagggctaagactgaggccctgacttcagggatgtgtcttcacctttgagtaggagaagcaggggtggtatctgcttcatctactcatgtacctgcagcacctagcacaggctgaccagcccatccttggacccaggcaagcggggctctgccctggccagcctccagctgcgtacatccccacaggctagagagtctgcagtgccaaggggatatacccatccaagtctttgctccttgtctagaatactacagattcctaggattcctgagctccctacctaaaagtcccaagcctgctgccaggcctcttcctggtctattgtctggaggcagaacactaagcccagggtgtagccaaggggcactgcagaggatagggtgtggatggagattggacctgcagcctgggatgtctacacacatgcaggtgaggtgtgcacggtacaggatggagctggggatgagaagggaaggtggcagtttataggctgggaaatgagcgaccagggaatggggctggctctccccagcaccgccacatttcagtgcgagtatctaagaaatccaaatcaatcctggcctttcaggctgctgagaagttatacttactgaggagaaggatagaacatttaagagaaggtattggtctgatttataatttttaaatatttagatttaagggtgagtggacaccagcctccaccaatatcaagagtgtgtttggcctagaccctaggagatattcaatatttatcaaatagatggatgaatctcatttaatttaatcctcacacagactcaacggagggaaatcacatcgtctgtgctttattgatgagggaactaaggcttggagagatttaatgactggcctatttgtcaagttagaagtttgtctagcagagctgagagcctcaagccctaacgtgtctgattccaaaatccattgcaattggttcatgacaagttcactcccattatgaccacattaaatatattataactgtttgagcatgtcactcgctgatctttgggaacataagcactgtttatattacatgaaaaaggccttctcttcttcattcttactctaccctctcaggcacctttgggaagtagtaagacaggagctaatgctccatttaacaaatggaaaactgaggactgagcaatagcccaaggtgtcaacgaggcttaaacaaatagggattttttttttttttttcatgtagcaagaaatccggaggtagctgggcaagggctggtataatttttgcattattttcagcaaacaacttctgcctcttggtctcttctggctatttattgctacagcataacaaactgcccccaaacaacaaccattgtatcgtctacagttttgtgagtcagaaatttgcgcagggctcagctgggtgatccttcagtgatccatggagcgccgactagagtcactcagtgatcttcagctgctgattgtgctatgctggaggatcgagatggtttcactcaggttcctggtgctttcgtggggatggctggaacactgagctcagctgggtccgtctgcctctccatggaatcccagggcttctccaggtgggtgtctccagcagagtagtttgacctttttcatggcagctcatggctcccagaggccatagcagaaactgccagtcctcctagaggttaggcctggagtgggcgtgacatcatttccaccatactctattggtcaaagaagtcacaggtcagcccagatttaagtacaggggaaattgactcctctcaaagggaggaggatcaaagaatccacagccatctttaaattatcacatggtccgagctgcttgagatgtagtcatcatgtctcaaattccagaaagtgtggaggactggtggaggaaggtgtttaccttcccttttaagacattttctggaagtcacacacaacattttccattggccagaacttacatgggcatacctaggatatggaagggaaactggaaactgtaatctttattgcaggaggcaagccatgtattctgatgaaaattagggattttgttgactaaggaagaaggggagcatgggtattgaggaccaactaaaatctattccatggttaggtgttttgttgttgttgttgttgtttttgctaccaacagccaaacactgttcctagcagagatgtttctataccagtcttctccttcctaacacatcttccactctgtcatcaaaataatctttccttttttattatttgttatgttcctataccgtatatcttttaatcattcctatgccaacagcaagtgtccgaattattttgtgttgtgtgaaacagtaatggggtttgccacacaccaggcactgtgccaagcactaaatgaacatatctcacttgatctccgcagtatcccactgagtgaggatcacagacgaggaagcagaaacccagagaggttaaatgacttgctccgggccacacagagagtaggtgcaaggctgagattcaaaccctcgactgtcagattccagagctgtgctgtgaaacccacacatgtgaagctcagggactgtttatggatgacagccccggagcatgggcaagacttgtgcctggtgtgtgaaggttacaggtgacaaatgtgagccaagagcctgcagatgctcccttcccgctgtgatccttcagtagggaagactgcatcaagccccagggccatgctggcatatttcatgaaattaaactggcaccaggaattcatatcattctatttcctttacaccctgactgaaccccaagtctggaggagactttgcagaactggctacattgctaagcagggcacaggcccagttaaatgaggcacctttctgctccagctccaagcttctctgttctgaccccggtctttcttgcctttgcctcacccctgttcgaggacatgcagtgactccctgttcccctcaagttcagttttgcctttctccaaatgctccttgtaaggactggggagaatacggttccatcctttcggtgaatttcagtttctgcatctgtcaaatgggaggaaataatccctgctttgctaagtaattgaaatgttgaggaccacacaggacaaggaataggaatggcctttgcagggcagagcaggcgaggggcacaatcccactggatctgagtagtatttagaagactaggcattatctcctcggaaggcagaaagatctggggtagggagtggggttgtggaggatcagggagtgccctgcaccttcttgtgggggctcctgcccacagtcttgcagaggaagtggcccagggtgagcatttacatattctatatgccccgctggggggacacagtgagaccaccggttctgaaaccagataaacctgtgtttgagtgtcccagcttcatctcgtactagctgaaggacctttggataagtcatatcacttctgcctccagtttcacagctataagttggggctgaaaaaagaacctgtctcattgggattttataaggaatcaaatgagaatgtgcgcctttaaagcacctcatttagcacagaagaactgttcaaccaatagtcatggtaagagtgactggtgttttttgagccctgattaaattatatgccataagagtcttcttgattagtttatatactcctcaccacaatgctaagatgtagttaacattattatttcccacttgtagatgtagagatggggatgcagttaggctgaacgagctgcccaaggtcatagtaagtggtagaagctgggcttgaaccggaacccagtctgtctgatgcagtcttccttaatcaatagccatgctgttactattactgttgacattactattattgaccttgaattctttacccaatatctccacacttccacaacacctggtgggggcaggaagagccacctgacccaaagactgccaaaatataggctgagcagcctgtgatacagcctgggacagaagctccacccagcagggctgagcccaattaactaaactcatcagcagtgatggtggctgccagtttgaattggaccacaaagagttgggatgatgcctacaagctgaaagaccctaaaagatgacataattcaaacaaatgtgaaggcacaggggcaatgagtaagccaaacttccaagacagacaagggggaggagaaatttgacaaacgtctgctcctgagatgactatgaactgactcagtcccagagcactgggtcctgaatgatgttccagtggctaagttgtattctgtgatgtgtggtcaaaattcctgccttccagtccctgcatgtagctttacaacaacccccatggctcaagttaggagagaggctctgctcttttcaaccaaaattaggctagctcagctctcccgtttatctttagggtaaatgctaagatttggaagtggtgaatggagagggaggtaggatcaggacatccctccatcaatcccaggtgacgaggcccagaagacatggcctggcccagttcctgttatatcagaaccttagtccatgtctcaccatctacaatcatatcctaagtgatctcactcaccatctggggtgactccgggccaggcgtctcccctgcactccagcctcatgcccagctactaactccacagctccgtccgtgttacacaggcatgtcaaatctcacctgtccaaaatggaactcctgattgtgcctccaaaacccaccccttctgcaggattttcatatcaggaaatgccaactctataattcgagctgcttaggtcaaataccttggagtcagccctggctgtcctgagtcatattccaacattcttgcagtccacaaattctattggctcttccttctaaacgtatccgtgccctccatgatcaccctagtctgacccactatcgtctgtcacctggggtgacacaacagcctcctcttgcctctggcctgccttctacaacttgttctgaactcagcagccagagatgtcctgttaaaacctaggctggagcttgtagtcctcttgctcaaaacccacccatcactgcccttctcactcagaggaaaaacaaaggcctcctaagtcacacagtctgacctcctcagtttcccctacagacctgcctccctgacctcacctcccagagctctccccagcccttcctctattccagccactcaaggtgatcaccactcctggaaggagaactcccacccatgggcctttgcatctgctgtgccctctgcctggggtgcccctccagcacggctccctatctcacttgtgtgggtctgcagagatgccttccctgggtacctcattaaaaattaccacccactccagcagtccctcccccgtctccttccctgctttaactttctctgtagcatttaacaccatctattgacacgcggtagattttacttactgtttcgtgtcatctcccacactgggatgttagctacgtctagggaaggaccttcttccatcaggtgtatcccccttgcctagaacacagcgtctgatgcatagtaggtgctcagcaaatccttgtcaaatgaacaaagaagcacacataagaggacttcctggaggcacccctacccagttctcacgcccccagcagccaccctctgggtgttccaggccctaggctagtcccctcacttctttgatcctattcaggggaaatcggcctcaggccctgtccgaaaacaggagaactaaggagaagctagtcatggaggaattagtccaaataggtggggatttctttttaattagaactatttttttttttcccttcacacaaaaggacttgtgtcccagtagctggctctcctgtcaaagcttgtcccgggctgagagctggagctctgtgttcccaccaaggatctactgtcagaatcactggagagcagcgtgggctttacagaaggaaggttctggggcagcaggggcacgtggcctccctgggacaggcacacacctggaaaccccacaaatgggaaggactccatgtgggtgacaggtgaggctggtaacaagcgtgtagggtcactgtactgttctctccacttcctgtagtttgagaattttctttagagagagaaaaaaaaaaaagagtgtttttcccctgaagttctcttttcccgacacatgcccagaggatttcctgtagccctccctccccaccataccccacccacaacttctcttttctcctcccctctgattcgaggagagagccattctgctctgcttactagctgcctgtctgcatctggggacacttacaaacctttgatgcctgtttactcccctactcgccaagatttgggtccagatggcctggtgaggtggtgctgggcactgatggttgctaaatgctccctgggtgatcctggcactttctagagttgagcaactaccttgttaccccagacccagccctgactctgccacactcagggatctcctgttaatagggtccagcctccttagaagacagtttaacaacatattttgttacctgagcccatctttggggtccaccatagctgcctaagtgacttgaggagatatttcttccaaacccagacaaagagcctcattcaccaccagcactcctggtggatgacatcctccctgttaccttatgcgacacgggttccctgtgaccatttggaaagtgcagagaagcacacaggagctggccacagcccacttcaagcccaggaatttgtgaacagaaaggagccattgtctccagtcacttgaagggaacagctcaaaaacacattcaaagggccctgatgataatgaatatgctaatatgatttccactgggcgcctgtgctacctccaaaaaaccctttctgaccttcctcatggattcaaagctttcattgaagtcgacaggggattttggttaaaataacatgaaagttttcatttaaatggacaaagctgggagttgtgaattaagcatgagtttcacattggtcctgacacccctgaccttgatggggaaatgcatagattgtgactggaccttctggaccttctagctattgcctttgggtgggcagagctagcaagcattaagggtcccttttgcatgacaagtgaactctggagacctaggtttaaatcccagctctgacacttactagctgggtgaccttgagaaaggcaaatcatttctctgattgagcctcaatttccccatctgtaaaatggtttggataatacttcccttgcagcattgcttccaagagtgaataagaagtctgtatgtgggaggggttggggaagtggaaaacatcttggagctccccaccgtctcacccagtcagagacccagcaagggtgtgaacacctccagcctcccatatcccagaccttctttccttcattcagcgtatatttataaagcatttcctgggtgccaggtactgttttggggctggggattcagctgtgaacagaacagatgaactctgccctcagtggagctgccattgtagtgggaaggacagacattaaacacatgaatagataaataataagtaagtgggctgggcgtggtggctcacgcctgtaatcctgacacttcgggaggccgaggggtgggggggggggtgttggatcacctgaggtcaggagttcgagaccagcctaaccaacatggtgaaaccccatctctactaaaaatacaagggcgtggtggcacatgcctgtaatcccagctactcgggaggctgaggcatgataatcacttgaacctgggaggcggaggttgcagtgagccgagatcatgccactgcactccagcctgggcaacagagcaagacttcgtctcaaaaataataataataatatgtaagtggtaataagttctttggagaagaaaaacaaagtccttaatgaaaagagcagagctttagaattagacagagctgaattcaaatctcagcttgctctttgctggctgtgtaatgcctgggaaagagattttatctccctaacactcttctgcacattttttaatgagacccactgatgaatcacccacccattgaacaaatatttatagaactctgggccaggcacggtggctcatgcctgtaatcccagcacttcaggaggccgatgcaggcgggtcactgaggtcaggagttggataccagcccggccaatatgatgaaatcacatctctactaaaaatacccccccaaaaaagaaaaaaaaatagctggacatggtggcgtgcacttgtaatcccagctattccagaggctgtgacaggagaatcgcttgaacccaggagacagaggttatagtgagccaagatcgtgccactgcacttcagcctgggcaagtgagccagactccatctcaaaaaagaaaaaagaactctgtcctgtgtcaagcattgttttgagtgctggggaggccacagtgaatgaaacaaaaatccttgcccttgggagcttaaaatctaaaagggagaaatagacaattaacaaatatacgtatatcaggtgatgaaagaaaaagcaagggaaggaggtcaagaatgtggaggacattatttcagggagtggtggtcagggaaggcctctctggggagctgacatttaagtggagctttgaaagatgtaggggagttagccatgtgggtgtctgaaggaagaaccttcccagtcggaggagacatcaagggcaaaggccctgaggtagggccatgcgtggctgttgggaggattagggaattggaggcaatgtctaagacacacccagcacagcccctggctctgagtgggggttcaatcaatagcagttattatttgtactcattttatgaaaaatgcaagagaagtcattttccattattataaaagttcttgaaggctttgtggattgatgactttattcccttttcttcttttgtttttctgaatcagaaccagcaagtccaacccccaagcccacctgccagcccgcctctgtgcccccagtcccaatccggcaggaatgtttgacatgcagtggtgctggagggagggagtgtgtaattaatgatggttattaaataataatgccagcatcttgaagttctttcctctccacagcctcacaaattagacgccttcgaaatgttgtgcccgtcgccaagatgcacctccatctggggtggaagcaacatctgctaaacagctgcatcttgtttaagagctggtacttaattcaattattcagctctgataggggcaggcagagctgagcggaaggggcaggcccagtcatgggcatatgctgctccacgtcttcccaagttgacccaaactcctctcccacagcgtccccactcgcatctgttgattcaaccaacctagacatctgtacatttccagaaccggccatgctcactcatgctgcctccttgctttttactcaagctgtgtgcccctgccaggaacactcttctgctgcctgtccaactcccgtgtccttcgaaaggcccaactcaaacatcagtatctcctccaggacagagcatagggaattacctcccatgagctctctcggtgcttcatgcattccttaactggagcattcataacattacattgcaattttgtgtaccctgctgttttgtaagccccttaggctgggaaccatgtgtatttcattcttgttatctcagcattgtacctgactccccatagacacacccagcacagcccctggctctgagtgtttagttaatggatggatggatgggtgggtgggtggatggatggatggatggatgggtgggtgggtggatgggagggtggatggatggatggatggatggatggatggatggatggatgcatgcatggatggatgggtgggtggatgaatgggtggatgggttggtgggtggatggatgggtgggtggatggatgggtgggtggatggatgggtggatggatgaatggatggatgaagagatagaagaatggaagaaaggagggaagaacaaagcggtagacaaacagatggacccactgccaccatctaaatccaaacaaccatcatttctcactgaaacactggggtctctcactggtctttcagtttctactcttgcccccagtagtctcttctactcaaagcacttagtaatcttttgaatatggatttatatcatgtcactcccctgttaaaaaccttccagtggcttccatattcctaaccctgacctccaaacccctataggaaacagcccctgcttatccctctgatatcatctcctctctgtcctatgctctgaatacttggggaacctgccaagctctctctcacctcaggacctttgaatctgctcttcccctttgcctgggactcacttccctggatttctgtcaagctagtatcttcttaagtcttccagtctagctctaatgccacatcctcaaagagacacttctttactttgccagttaaaatagccaccattgtggtccttaaaggccaaggggcctgatccaaataccaatgctttggctgctgaaacccaacaggcttcccagagcatcatcctcagctggggtcgtgacgcagacctcccccaagtgcctgccctacaagccatcccttccctgggtgctcactcctcctctccatcaactaaagatccttcatgaatgggcttgtctggaactgccgcaattaaactatcagagcaacattggaccatttgtttactatggcacttagagctggaatggcttgttgttttgactgtttctattttcagctccatttcctaggggtagtggggagagggtaggcaatgaatcctggtctgttcaagcaaaaagatgcatcagtgaagcctagaatttcagagtcacagaattctagcatcattgtcatggaatatgagagcagtgaaaatctataattttggttataggttcctagattcacgagattctagaatcttactcaatgaaattagaatcttaaagtcagacaaatttagactcaaagtcctagagtgatgggctctgaggagactgtcactttgtctactccatatctctttcccagaagatcttctctgggtaccttatccacaacgttcccccctaccgacccacagcctgtcactctctattgttttaatttttctttatggctctgatcaccacctgacatttgatctgtttctctgttcatttgcttattgcctgtctccctcacatgtgagattgaggtcaggaactttgttttgttcaacgtttagaacaatgcctggcatgttctaaacagtactcagaacaatgcctggcatgaagtaagggctaaaaaaagcagtgcccattcatccaaaaaatatttattgcatccccacttcatattggtgcctcagagatgatcttctctcaggacaggaagcaggtctcactttgcatgccaaatgcaattggcagtagatacccagagcacggtgttgaaaagacttcttggggcttatccaagctccgtggggaagggcaattgatgagcaatgtctggcatagactcagccatgggaaaaagtggccatctctgctctggcctccaaccctgcactgaaaaaaactgaggtccagaagaagatgcactgggcatgcatggggtgcatagccagagttagaaccccatcttcagtctcccctcagtgttggttcctgagcccaagcctctcacaagcacctgtgtgtgccctcccctccccatcagcccttaggctctccctcccccgaggccttcctgggatgaaggggctgctggagtccctggccctgaaccacagcctgggaacccaattctggaacaccgcctgaatgcgcaagccagttatttttaaaaatccaaaaagaaaaggaagaaagagaaagctcactgcttcggtctccgcactagccctggctcagagaatagagacttgaaaggaacaaagggtttcctcaaacacagcagatcaaggccttggcttatgtggtaaccggtaaccgaccaccgcgctttgtgacaaatccttcagaaggcaacggcctctgttccctctgcagccttggcagaaggaggtgggggagcaggggacacccttccccatcgccccccagccccagtcgggctgcttacaatcatggacttcgagaacccctgactgttaggacctcaaaggccttcacagagcatggaatccaacccgctctgggtcagccaggcaggcagaagccctggacaggctcaaggtcacactttcctcctccctgggttctctttgaaggaggtggagaccagggaagtgcacccaagcctccatttcctcttgaacccatcacagctgcctgagatgccctctcagaactctcccagctaccaagattcctacttctttttttcctcctgtggatttcttcttccaaggtgcctgtggggtgtggtttgacccctggagacctgggggtctccaggtacacagcaggagtacacagaggggtacacaggaggggtctgctggtggattatgagatcacagaaggactacagtccaccctacactccaggttggacaatagcagctgactcaggtgctgtgccaagccctttgcagtgaggcctcctgtaggcaccgtggcgatcctatgatgtagataggcattgttagccccattttccagacaagaaagccaaggctccaaaagactgagtaagggccccaagggggttggcagggattggcagagctgatgcttgaactcggggttgcctgtcttctaaaccacactctgttaactggtctgctctgccccaccctctgtgcatcaaaggcaggcaatgcttcaccccactctcaggcactgaggaaggcagcagaggggccgggctgggaacaaggggcttccctccattggaggccattgtgctcacaagccacacactcgcacctgcacgcaggctgcagagcccatcaggtctcctcatccacccctccatgtcagcctctctcccctgcctccttcctgacttgcaatttctctggctcttttctaccccatctgtcaatctgcatcgtctccattctgtgggcctctctctctttatcattttctgcctctagctctgtctcttccccagccctccccatttctctattcctatgtcttccctttttgtctctctgcatctgtgtgctactttctctctcctcagcatgcttgttctgtctctctctctccctctctctctctctctctctctctgtctctgtctctccctcccacctctccccccacaatattctgtctctcctttaatcctcaatatccagggtttcagtgtctccatgtctcttcccccagcccatctctccctctctattcttacacatctctccctttctccctagcattatctccctctccctctgtctctgctctatcctcccttgctttccctcctgcctctctttctgggtgtgtgtgggtgtgtatgtgccttgtctctctctctccctctttctctctctctctctctctttctccctgcctctctccatccctctgtcactctatctccctccctttgtccttgtctctgtctctttctgcttctctgtctctttctgtcttcctctctgtttttctctctctttctgtccctctgtctctttctctgtctcttcgtatctctctgcatatctctcgtttctgtctctctgtcgctgttgctgtctctgtctccccttcatccgtgtccctgcttctccccttctctctctgcctgtctctctagccttcctcaccttccccttgccacccttcctggagtggctcctctgtcgcacccccacactgacacacaatattccagcaaatcccggcttagctgtaggggggaacaaggagggattggtcaggggtattccaaaaagtggatttcagaagtgaggtgggattgttatgttaaaggaaacggcgccagccttgtccttttcttcctcagaaatgactggttgctttcctgggaggcagaagaaaaaaagtccctgaatagagatttaaagcagtaagctcagattccttctttttaatatttataaagagagaaaggggataatttcaggaagatcatttcaaggcgaaaacccacatattttcaatagaattattccaaaagcccctttccggctcattggagtgtataattttgtaagttaaagacaccaggcctggtttccaagttccctaaaatgacgcagctaagtaagagccagaaggaagtaagatgaggagaagagggggagggcagcagaggagatggacaagcttgtcccagggctgaggccaaagagagcagcagccggcatacctgccccacctcctctccttcgcctgtctcctcaacaagccagccaaactcagggctataaacgttgtcaaatacctgtccccaatcccgagacccatctccaagtccagacttatagaggcaagtgccggtgcaggtggcccatgggctcttcaggcaagatgtgttcagagctgcccccacccccgccatcttcctccccacaccacctccatccttggcccctattcaaccaccgctttgcccaagctggcatctgggagtcaggcttgggtcctccctcacccctgccccttctagttagttgccaagtcttgttgattctacccccttcatacctgtgggatctccttacatgtgcattttcactgcccagagtgggcctccgcacccctgacctagaccacagagaggctccagcaggtctctgggcctcttgcctatattcaagctgacggagtgaccttcgcatagtccagctctgaggatggccttctctttctcagaaacagtcagagccccctgtccccgtcacctctaaggtgaaggccaatttcccccaccctggcatccatgatctagctacagcctgatttccttgtacccaccctcccatcacaagttctccactgtggccaaaatgactcactctcttctgcctacccgaacggaataagaatcatttttcgacttctaagccctggctgtggctcctctcttctcctggaatggcatcctgctgtcttggcctgtgttgctcccacccaaccttaagttccagctcaaatggtcctcgtggtcctcctggtcacgggttatctttccttctctttgacccatgacatttcactttagacatgagataggctgtgtggcctgagaacaggtgaggtccgtggctaaataaggaacaggaagtggagaccactctctgacattctcccaaaccaaaccaagtgagattctgtggttctgctgggtgcctaaaattgtcaccagggtccccagataatacttactcttatcacagtaaatagcaatgtcattgcaaaaatcagttattgagtactcactgtgagccaggtaccttgctaagtgctcttcatgtgttatctcacacagttcacaataaccagtgtggtgaggactatcatcgccccagtggtactgatgaggaaactgaggctcagagagggggagtggccagcacagcatcactctgtgagccagaaagctcaggactctggccaggccagcccaactctggaatccttgagtttaacctcaaacgcactgaaaatgctgacacttgagtattagcaggaactgggtgatgcagtccctgactcacctcccataaaggaggaccatgtgctgtgaggccatggccacagcccttccttgggcccagcttccccatcttctcaatggtccagttcctgtttgaaaaacctttcagaggctggttctgtaaaccctggagacacagtttgtcttcctttccctggggaaaggctcatctgggagaggtagagcttagaacttcaaaggaagccacaggggcaaaaatatccctcctgcctcttgtcccaacaccattcttggtttgacttggccaagaatgttccctggtccacctctgaaagtctgcagggatgcttccagctgttcccactaaactctgcttcctctgacccctgccaagaactgacccttaattcccagactgtagcttcatctctcaccggggcatctacaccagcctcttcactgctcccactctagaccttacctgcaatgcagccttgtcgttttaagcaaaaatcacaaggtctctttagttcttaaagccctccatgggttctccccacagaatacagctcgagctgctcatcccagcccccaggccctgtgtgctctgatccccaggcctccctgggctctggccacaccatccttccaacagggcctagaacaaaccaggttcttcttcacctcaaggcctttgctattatgctttcctgaattgctttcctggctttttccttcctctctttcagttcaaaaatcataccttccccaaggccttttctgatcccaattatccctggtaccttcctccctgcagacattcacaccagcgatgtgttcatttccctgtaatgtgcagttagatatttgaatgcttctaatgtaccgtcggttggaggagtggcagctgcaaaattgcagactaggaagctccaagctgtcattcaccccatggaagcaccaagaaaacaaccagagactggtttagaactaatataggagctctggaaaacagtcaaaggtttacagcacccaggtgaatacctaatcaagaaaaagccaccttcaaacagcagaaaaagttttgtggcatttttactcccttttgcccaaccccctccctggcacagcagcccatttccctcccttgagccagagggagcaagcctaccttactggcaacactctaactggtctgaggcctgcctggaggacagctctctgttttgtctaactaaaatctcaggtagagggaagctgagggcactgttggtggaagctgcagggagactatagacccatagatgactggggcaagagattatgagtggacacacacaatagaccatctgtggccctaaggagaagctgggtgctggggtaagattctttgaaaaagtaagacattcaaaagcagctgtacatatggaggaattgagtaagccacatttaggagcaggcaagattcattctcagaaaagacctgagaagacctgaagctttcaccttggtgaaggattgtgtaacacagagtcagtttgcaaagcctgggagaggcagctgttttttcaaatgtccagttttcaacaacaacaacaacaaaaacacaacaaagaagtagaaaacatggctcattcaaaggaataaaataaattgacaggaactatccctaaggaagcccagacattggacttactagataaagactttgaaacaactgtcttaaaaatgctcaaagagctaaagaaaaccacagaaaaataactaaaggaaatcagaagaatgatatatgaaccaaattataatatcaacaaagagatagaaattataaaagggaaccaaatataaattatggaactgaaaaatacaataactgaaatgaaaaattcactagaagagttcaacagcacatttgagagaaaacaaataacaaaattgcaaaagttcctaattaccagtaattagtttaaatgtaaatggattaaactcaccaatcaaaaggcataaattgacaggatgaatttttttaaatatccaactatatgctgtctacaaaagactcattttagatacaaatagattgaatgtgaaaacatgaaaaaatatatttcatacaaatagtaaccaaacgagatctgagatggctatacgaatgctatacataatagtcaaatatgtttacaagagacaaaaaacattatatactgataaaagtgtcaattcatcaagcagatataacaattacatacatatatgcaccaaatagcagagttctaatgtattattcaccctgctccccagacgttattccatgagagcaagaactggatctggcttgcttactgctttgttctcataccaggcatttatgactaacacacatttgctcaatttccactatccccactaggtgaccacagcaaaagtggacagatagcgtctggcaagcttcaggcaggagcttgaacctgaccatcttcagctgtcccagctgtcacctccagaaatctgagatcctttccttgccatccatggtccaaccatgaaaataggagtgaaggtgtttaggaattgtgatcaactctagtctccccagccaagcacttcagggcttacggctgcatatcagggaatccaggggaccaagggaggcgggtgagttcaccattggagttgtccagtctgaatggccagtgttacccatgaggaccctgaggctcagagagggcagggaaccagctggaagtcacacaacaagctagtggcagagctgctgactgcctaccacctgctgtttctctaagttgccttggcgactgcctcagggactgcccatagcatgcaatctctctaagttatcccttcccctccatttcccctttcatttctccttttcttcgtgttattttttgttctccatccctataccacaccaggcctctcacggcctttcctagatttctgagttagaccatctcatttgacccccacaatgacctgtgaaagaagtgccttttaaagccccattttccagattagataactgaaaccctgagatagaaagaggtcagccagtgacgccatgtgggcctagaactctgcccagcctctttactccaggttccaaggccttgtctgccctcaaaagtatcaagagatttatttaagcaaaaaacatcatgctcactacaagcttcttaagaaagccttcttccaatcaccaagacccctggctgtctttctcctgtggattttccctttcatctcaggatgaccgcgagatatgaatgttaccctccaagctgtagcatgcaggaaggctggggcccagacctcaagctgaaggcattagggtgggtgtagggtgtgcccagttctagacaatttcaacctcaacaagctcagtgcatttgccacttgataagtgctgagctgaatggtttgcaggtgttacctcaaattcatgcccatcatgcttaataaggtcaaaacccttacttcattttgcaatggaggacacagtttcagaaggggaagtgggttgcacaagagcactgatggtcattagctggtctgctgggccttgctcttaaccccctccttgtcttggatcagggaccacagggtctgtgggtggtggtgcatgcaaaacatgaagatgtacagaaggatcagagcttgtgtaaatgtgtggatttttccaggttgccttgccatcacttgttttttcttctagagagtgaggggcagggagagttcaggtgggaaggcccgggatatttttgctgaaaccatctgttctaggcctacttctgaaatgccctgatccacataggggagggggaaaacagagatggtcgagagtccagccaacgtctaggggcaaagatgaggggctcagaactcagcaattcggcccatcagtcagggatagcagcctaaaactgtggtcagccatggggtctggagaagactgggtgggatggatggggaaatgtttctagaaggaagaaggagactctggttcacccccagtttgcaggatggagtcattgtgcctttagggaagagtgagcagctggctggaggtctatactcctgcctgcttggtctggagtttctctcaccctggtcacttgatcctcttacttttcctgtcagtgaggaagctgtttactcccagaaagtcattcattccctgataagatcaatctcattgttaagcagaattttcacttcctgcccgggagttggcgtagcgcgaatgtccagcattcagagccccataaacagtcagcatgagagaggccctagaggccaacactgcccaacagctcctgatgtaaaaatggggaaactgaggtccagagagaggaagagcagggaaaggagtcagtgtcagagctgagcccaaatccaggccctgccaccgctactccaccattcctaggtcaggtggtgttttgcatgccatcaaagaaccccacaatttcatgcgctcccttttgattttaagattcaacatgccattctaagaaaacttgctaagaaaacatttcaacacaatataatattttaatgtaacactaatatactattataacattgcattcaaatataatgttctaacacagattaatattctaattcaacatttcagcacaattctaaccaatattctaatcctacactctggagcaacataccattctaacacataacattacatcatgtcctaatgcaatattataagacattgtaccacaacattccaatctaggctgctaacgcaatatgacatttctgtattatttgaatgcaattctaatacgacactctaaaataactaagttattactctaatattaagaattctgagattttaagcctctggaatgtccactggacaaggtgatgtcatgccagtttgtgattcatgacgccagagcccttcctagttccagcggcccccaggacccaggtcaggtaggtccagctgtctagctttgtagagggagggcaggtccttcccaaggcacagggcagggactccttgacctctggtagctacctgtctcctccaagccacatgcttttgtgggctctgggttggggtaagggagaaggaggaagaggccacccattctgggctcactttgagcctgctgggacaggcaagaatgatcccaatattcagaccaggcacttcttgccagtttctatgtgggttactaggactaagaataagaggaagatagtcaggttcctgaggcagcactgactccttcaggcctgggggaaccacaggacacctctcaacattgcctccttctgttctctccctccccacccatctgcagccttccagccacaccggccgccttgctgttcatcacattcaccatttcccatccctgggccttcacgcttgctgtttccctgtgactggactgctttcccccaggtttccagtgatccatctcctcactttctttgccccactccctgctgcggtacccccccaccccaaggggccctctagggtcaggccatcttcaacagcaaccctatcatgctggtcccttttcctggtatagatttccttcaccgtatgcatgtatcatggtctgtgcattttggtgatttgctcatttgtctcctttccccaaaaccatggttctccatgctgttggcctctgggatcacctgagtggctactgaaaatcccagtgccccattgcagagcctggtgcggcaatggctcacacctgtaataccagaactttgggaggctgaggcagatggatcacttgagtccaggagtttgaaaccatcccggacaacatggcaaaaccctgtctctacagaaaataataaaaattagccaggcatggtggcatgtccctgtcatcccggctactcaggaggctgaggtgggaggattgcttgagcctgggaggttgaggctgcagtgagccaagatagggccaatgcagtcactccagcttgggcaacaaagggagaccctgtctcaaaaaaaaaaaaaaaaaaaaaaaaaaaagaagaagaagaaggaagagaaggagaggagaagaaggagaagaagaaaatgtcccattgcagagcaattgagtcaagatagctggggtgaggcccaggtatcaataatttttaaagctccccaagtgattccgatgtggcgaaagctaagagccccctgaactagactgttggctcccggaggccaggaccacttctatcttgcttaacagcatctggcatcactgtctgatgaagagtaggtcctccacaaatatctgttgaatgaataaaccattcaacaaaatatttccatttaaaaatttttccacgtagcaaaaattttaaacacagaagatttccaatgaaaagtgaatttcctcctttcctaggctaagttgtcttaaaaagccaaccagcattaacctgcgggtggggaggggaggaaaagggtattctctgcagagggcacagccagtgcaacgacctgggggtatgaccctacttcagtctctgaccctctcaagtttttacaccttggagattctccctcttaccgccttcctcaggatctatcagcctgggccacacataaccttaccaggtgcccttccagaatgcccacatccccagaaattcagattctctaaattttcttcaagcctcagtttcttcttcattctatgggggtgattattcctgcctccacgggtaggggtagtgttctgagcacctaatgagatagtagctatgaagtggtaaactgtaaagagctgtgaacttgacagttgtgtgccctctctgtgccaggcatgtgccttgttccttagagatgccatgtcattgaacctgtaccacggctggaggtgaactattattgtactgttttgcagactgggaaacagaggctcagagaagtggggtgacttgcccaaggtcacccaacctggaaccaaagccaagttttttcatctccaaaggccacggaaatcgtagatttaaggactttcagcccccaagtaccaggtctgttaggtttgaggatccccagccccgagagcactggtggccaggacagggcagacagtctggtttcacaatttatttcacccccacccagttgtttgccaaagggaggggtggggcggccggtggctgggagcctgggccgcccagtcacagggtagacttgtctgcctgccagccaatccaggctgccggagctggcgttggaaaggccctggccccatcttgccgggacactctatctttgtccctgaacacaaaaggggccttgtcttggcccagcagtgctgattccacatgctcccgactgccccagcccctctgccacgagaaaggcccactttgtcgagtcaaaagactaacttgtttctttttcaccaaaacgtgttgactgacctggttgatttatcttgggaaagtggtgaatgagggaggggagagaggtgacagagacaggcacagtccagaaggccatgtatcctggcctgacttgggggtgggcacccagcccttacctgggacagagggatagccacataatgtaatttcaggggattaggacagtcgtccaacctcactagtagcagagattccaccattaggtattcatttctttggctttaccctttgaagacagctaaaaataaaaactccctttgaatgggaatgccctattgtcacaagtgagtgagaattagttttcctgagaagagaggtgagtcagaagagaacaagcagcaggtgaggcggggcagcaggcaccaggagcccagagggaagctgggagaatgaggagggactactcacagaggaagtgagattacgtgagggaggaaacaaaagcagacttttctttggtaatttttcctcaatatcaggccttctccctccacaaccagcaacaccattgcttagtcttcttccttcctttcttccttcccttcttccttcccttccttcccttcctttccttcctcccttccttccttccctccctccttccttcccctctccctcttcccccatctctctttcctccctctttccccccttcctccctctcttcctccctccctttctcctttctttcctttctttcttccttctttctcctttactccattcaagaaatatttatggccaggcacagtggctcgtgcctgtaatctcagcactttgggaggccaaggcaagaggatcacttgagcccaggagttcaagaccagcctgagcaacattgtgagaccctgtcccaacaaaaaaaaaataataatttttaaaaagccaggggcagtgggctgcacctgttgtcccagctacttaggaggctgaagcataaggatcctttgagcccaggagttcgaggctgcagtgagctatgattgcgccactgcactccaggctggctgacaatgcaagaccttgtctaaaataaaataaaataaaaaagtatacagttatatatttgtaatataataataaacaaaaaagagaaaatattatgatccccacactatgctgttaaaagagagagagagaggaatatttattgagtacatactctatgccagggactcttttaggcaccgaggccataacggaatctcagacccctgtcttcaggaagtgtccactcttcctggtgataaacaattaagtgcatgactaacgatcattctggcaggggtacgtgctgtgaaaggatggggcagggtggcgaggcagagcagctgggatgcggtggaaggactgggttggccgggctccctgaggaggggatcatgctgagacatgaggggtggaagggaccagccgtggggatgctggggacaagtgttctaggcagagggaactgtacatacgagggctccagggctgggccagggtggagccttccagatacactgaggccaacggcattggcttcccaccaagtgcatggaggggcgacagcaagaggaagggttcagagtggcaggggctggacccataaggcctggtggttcctggtcacatcctcaggtttttatcctgaataagatgggaaactataggagtgtgcaagaaggtaacacaatctaattttttttatttaaaaggccccccccggctgctgtgtggaaaatggatggaggaggctactgcagccatccaggtgagagctgtcagcagctaggctacaggcgtgacagtggagcaggggagagtgggcagagttgagatctgttttttagagctaggatccagaatgaatgaatgaatgaatgaatgagcccctgagggataaaatttaggctcgagttcctgtaatgccactgagtttcagtgtgaccctgggcagatcccttcccctctctgggcctcagtttccccatctgtaatgcaaggcacaaggagcctgggacagctgacgccaaggtctcctgcagcattcctgagcctctgacgcttgcaggggcggaggctgtgatccagttactaatccagtcaggcctggctcatccaagggcagctgcagaaacctgcgggtgatgcattgactcacgcgtggtcctctgctatcagcagaaactgggacagccaggggcctgagactcacccgcaggctgggaaaggttggcaggatgcctctatgcagctgggggaagggagcaggctgccagcactgggcttcctgagcccctctggggactgatgtgacagccactgcagccaccgcagccaccataccttcccagttggcccaagcttggcatggggctgtgcccaacctctgtgggctaccaggagacactggcaggagcacaggacctgctgtgtgcccactccatcttctctctgccaggcacttgatgaagtagacagtaatactcctatcttattgatggggaaactgaggcacagaacattgtaggtggccaagccaggagaatcctactatgtttgactagttctttccattgttctgctctgcctccccagtatgaagcagacgggtgtgaaagagaaaggaagaaaagctaaatatgttttaataaatatagaaactcacaccctcatgttttaccagggccgaggactttcaaagaaaagcttcttctttttgcaacctttttgcaatgtggctaagccacttggccattgtgcacagctcttttactgctcatttattcattggcaattgcagcaaatatttatcaagagccttctacatgccagagactacgtgagtctctgaggagggagacacgacgattagcaaaaagcgacttcatatctacactcaccggcttgtattacatagagggtgagagagatatcaacaaaaaatttggaaactctacagtcatttttaaattctgcttcgagtaagttccttccttctctgagcttcagtttcctcattataaaatgggatagttagagttcctccctcatgaggctgaagtaaacagttgatgagatatggcctggcccacaatatgtgctcattaaatcctagttgttgctgttatcagttcctgtgtatagcataacttcagtagcctagtaggtaataactgtgttaggatggcccactgaaaagcagacgtcaagattgagttcaacatacaagagatttattgagagagggagcaggagaaggcaggtctggcacctggggaaggacagggagaaggaaggcagattgcgtaggaagagtcttgaactgcagtacaattcaaaaaaggttaagccatgccaatggagagtccttgagccaaagtcacttactggaagggttcttcatctctccagagtgggcctgcctttagtattcctgccatgctcggtggttggctgacagcagcccacaggaaatgtgggttcagcacagatatggcagcacatcccaagggacagcagctggggccgtcagtcaatcatgctccccacggtaggagacctgagcagtgcacgttcatggctgccgcagtaaccagacttggccctggagccagagggttccgaaactctgcacagcccatcaaaatgagttcatgcagcattccgtgccctcagtgtgatacattaaccagccagggcatctatggggagagtacttggccagcatcaagaggtgcacaccttggtcaagttttagattgtgcaaggtggaaaataggatggaatcaagaccactgggggcccacttggaccaggcactgctgacgtcaggaagggaggagttggaaaggcacatccaaaaatctactcaggagatagctgccaagagcctgtgctgttcagaggcaatgaactttcccctgaggaaaggggaaaggggctccagcaccatgcaaggaaccgtgctggggcgctggacccctaaccccctactggaaggtttttgggtttctatggaatcttctcggctcagtgtgggaaggggacttctcacccatccagtccaaccctctcattacacagatagggaaagcgagacccaaatgggaacaggagctgcacaaagtcccctaagagccactggctgaactgaggctccagccaggattcccagcacccaggccagggctgggccccctgcgggcaaccctgccagcatctgtcaagggactactacaggaaagcgggaggagggcaaaaaagagactgatctccggagagggagctggggctcggagggcagacagggagatccgaaaaggatggggagactcagaaaggaggctgaggtctgagaggggcatgagagcttggagagcgtacaggagccctgacagagggacaggggctcggagatgttgggctcaggctctgagggcctacagtgccccaggcagcccggcagctctggaaggcagcagcttcctctcctctcggcacttcacacccctgcagggccacccggagctggagggactgacactctcaggcattagtcagctcgtggcggttaaaaaaagaaggctcgatggcacttgtgaagaacgtctcttccagctttgagcaccaatgggctgccacctccccgctgcaccactggccaaggatagaggaatcgggaacagggcggagggcccagaagctgggacccctaccccaacgagggcttcctcccagctcccacctcatgatgatgatgataataaggtcagcaataccattagtagtagtgtttgtgatgtagtgtagtagtagtgttggcacatgcttgccactggcccaggcatgtgaggagggctctgaccctgaacttgccctgagtccattcacatccagatgtcccatctctggggctgtgcatagggcatcccctgcaacagcctggtccgaaagtgacccatgtgcaggtgcaagctacaaggggactcagaaggctcccacttcagccaccacctcccacttcacagataggaacactgaggctcttggagggcaacagtcatccaatatcatgtggcaagttgcccaggtttctgtccccagcccaggggtaattccagtaagccaactggtcaggcacccaggttcaaatgtgggctttgcactgcttgctgtgtgaccttgggcaagtgacaccgcctctctgtgcttcatctaaaaatagggataaaaatacttacctcgagtgaggattagaacataaggcaggcatccggaatctctttttgactgctgtatgcatggtcaaaagagcttaaacagcttaaaaagcctgacccccagcaaaagtgtgaccaatgatggttaacatgagtgagtgctggttctgcctggcacatgtgaagattcatgtagtccttagcaatcccacaaagtaggtatttttgaatcccatcttccacataaagaaatttaaatgaggcacccaaggccacagagctggaaactggtagcatcagaagctgaattcaggcaggtgagcactgtgctaagtgctctacacaaatgcatttgttcactcattcattcatgtaacaagcagtaagcacctattatacaccaggtactgctttagataccatgcatacagcagtcaaaaagagagtcaggatgcctgccttatgttctgtttctcatttgtggtaggtatttgtgttatctatttttagatgaagcacagagaggcagtgtcacttgcccaaggtcacacagcaaggagtgcaaagcccacatttgaacctgggcctagctgatgcctcgttttctgtcctgagggacccttttccagcaatatccccagaagggactgaaccagaggtgtatgcactgatgtctgtccagggttcaggcccattcagagccccggaacactccatcccacgcagccttagcctcatttcccaagtggcaagtggcactcaggccccaccctctccaagctgtcatgaggattccttccttctttcctaacactaattgagatgcctcctgacattgtacagataccatagtttaggaaacccctcctcctttcctagaggttagttttgcttcagtctgcagaagagaaaacccaggggtctcagaggtgacatgatttaactaaggcagtgactcaatcagaattcaagcccagacatgtgtgcctcaaagcagcagcagtcagggtctcagcaggagcagatggcaccctccaggtaggtcatttgatttgattttaataaagggatcacttaggagggatgagaaaagagtatagcaaaccacaaaggataaggtagtacctcagagctggtgcaagtcgaactattatgggctcaaagggtgagaggagggagaagggagaagttggctgtcaccaggagataagagagagcccccaataggagatgtggccttcagttgaaggacacaggcagcttgaggggatcttgaaggcagagaactggggaataaatacaccagcctcactatcctctctcttcccagatcccaccagtgctcccaatgggccagacccaatggaaagccagacaacaagggttcccttgattgacataatccctgcaggccaaccactcaggacagagagcaaggagaaggatgggaagaggatctgagaggagaaccacaagatctccagccaaagtcaagtacactttccttatctactgccttgtgcttgcagaggcatagtaggttctgttgtctatgccagcaaggtcactatggaaggtacagttgtcactacggctagttcatgctgcaggaacaaacaactcccaattctcaagacttcaaacaggttggcaaactatagcctgcaagctggtcactcatcttgtaaacaaagtttcatcgagacacagccacaaccacccatttacgtactgtctgtgcctgctttcttgctccaacagcagagttgagtagctgtgacaagcctaaaatattcattctctggccaagaaaatttgccaacccttggcttaaaaaaacacaggtttgcttcttactccggttccctgtccatctccagttggcaaggcttctcctccataacgtccacagtcaggggcccaggctggcgagccctcccttgaagaacccgccagtctccctggcaggggatgcagacaaaaaattgctcaccagctcttgaggctcccatcagaaagagacacacctcacttctgctcacagatcttggcagaaatcaagtgccaaggacgtgcctaacttcaagaaggctggaaagtacagcctctccacgcaccccacatgaggagacccagaaatggacccagatggtggatagcactcctgacaactgcggcatgcgaacacggcaaacggttgtaaaacaaaggaatgaggacaccgctgggtcttgcagcaagcttctccagaatccctcctgtgcacagggctcagggaagccagacaggattacacccgggggtggagaagctggagagaatgcatgtcacatgcacgctcggccactacccttttttatggcctccatggaaacagaagcagaaaccagagggtccctaggagctccagccacacccacttctcattctctggggacaaatgtctgagggctcccttctctctccatcagggtccagaagctggccaaggactgaagaggctttggctcaatttatgactttattaccagtcgccttccagctgtgagcctccacttccccagctgcaacaatctgtgggtctcaaggtgaggtcctgtgactggcagcatcgccatcacctggaaactgattagaaatccacattctcaagccccacccagctctattgaatgggaagctctggtggaggatcccagaaatctggacttcaacaagtgtctccggtgattctgatgcttgaggaatataaggcacaaacgaactgagatgtgcaaagcccgggcccgcactgcttttccagcagtcctccccacctgcataaatgacagtttcattctggtttaagccaaaaacctggagccatcctagagggttctcagaccctaatcctgtggcttagcctttagaatatattcagatcttggcctccctctccacctccttcactctgcgtggccctagcctctgccatctgacacccacatactaccttgcctttctaacccccgctccctcttcctttgagccctgtagtacatcctcactccagcagccagaagatgctcttaaaaactcaatcagatgattccacgcttctgctcagaacctccaatggcttccatctcactcagaagaaaacctgacagggccgcccttggtctgattcccactgacctctccacctccccaacgccctgccgcttgcttgccgtctccagctgcactgacctgttctctgttcctccaacatgccaggcacgctcccgcctcagggcctttgctcccgctatttcctctgccagaaacccctctctagtgatccccacacggcccaagccctcacctccttcagatcaccgctcaaatgtcacctcctcagagaagccttctccgaccccgccatcctgcgctgccccctcctctggctttgtttttctccatagccctcaccaccacctgacacacatctttgttgtttctctgtttatagtctgcctctccccacgagggtatgagggccacgaagccaggcactgcctgctttgttcactgctgtatgcctcccaatgcctgaatattgcctggcatggagaaagccctgggtaaatatttattgagtgaacagacggataggtaggtagacagatggatggacggagaaatgctcattccttgggccttgctgtggtcagcacgaggcagcccccatgggcacgccccaagagttacaccacagaaagaccccaggattgagggctgggtccttgtatgccgctctgggatcagcaggtctgggttcaagtctcttgaattgacctgaaggaaatcacataacctctctgatcctcaattttctcatctctaaaatggggatgatgctgataatgtgtatcatgtgccttaaccttataggactgcagcgaggactaaacaaggtgcacgtgaagggttgcagcgtgatacccaatacctgctaaatccacaacacacaggaattactgctgcccctattgctttgctttcttctcaattttgccagtggcctggggtacttgggcagccatagggcttattgggagtataactggctccaaagaaagggacttgggtttgaatccttgcagctactatctcgctatatgactttgtgcaagtcactagccctctctgggcctcaatttctccctctgagcaatgggaaaagggtattgaaggaggttgttttgtgatccctgcaacttgcctccccaagtccttctggaggaccaagcccacgctcgccaagccctctcctcttcgtggctgcagtggggaggccctgaagctgaggaggctggctggggctcatgctgactcctcccctagcctcactgattctgcagggagggaagagagaggcagtactgggttgtggctgaaagcaccccaactccatgtctaaaccggagttctccctctggtttctgtgatttgagtgagtcacttaacctcttgtgccttagcatcctcatctgtgaaatgggaataattatcacctatgaggataaaataaactgctgcgtgtaaagtgtttagacaagtgcttggcacacaattatcactattattataatagctgctattatttctaacaaccacagctggtctctggaccaggcaccatcagaagtttttataaactttgatttaattttcacaaatattctacgccattattgtctccatttgagaggtgaacaagtttggctcagagactgaagccatttgcccagggtcccacagcttgcaggtggagctgggtttgaacccagtgcactctcaagcctggttctttccactcaccatgctgctttcccttcgctctccgttttactgatggggagacagagggttacagagctcactcccaggcctcagtcctgctgggccctttcacccaaagcattcctggatccatgcaacatcgtacctagaggcagaactagaggccatgatgactcctattcacaaagaggctgctcagtgtgaggggcagagcagaacctggcctggctgccaacaggtgcatggccaggtctccaagggaagtggccccagcagctcccaggcagccagccccccctcagctgggcagcccctgatcctcctcccatccccctgctttatgacctgttttatgagcgggaggcctggcagcttccacgttgccatgggaaccagcccagtgcgggctcctggcagctcaatcagggattggcaattttaagtcaggagccaatcctggggctagcgagggtttccatgggttggggtctgtgggccccagggatgcacagtgcctgcctgactgtctgcctctctcctctgctccagctccccaggtgcccaaagaactcagggaccccacagctggaagatgacaggctgttagagccctggaggagcctggggcagcagggaatgacatggaccaccgagtgggggctgggagagctgacagagctggaccgtggacacacatgcttaggggcacacagagacactaggacagctgacatgaagggactcacaatgatatacagatacagactcacacagagaaacagagatatgcacatggcagccacatgtgcatagcaaagaaaggtacttgcaaacacacagacatacacaaatccataggaatacctgggtgcccagagactcacagacacacagacatccaaagacacacacagaggacacttggacacccagagatacatccagacatacacatagacacacaaaggacgtacagacacacactgctcactgcctgtgtggtccaggcagcttgcccaaactctctgagacccaatcgcatcatctttcaaaagggcatcacaatcctagcttgtgaggacagggaggaataacgaggaaaatggctgcgtgtgctcagacaccttcattcatccagccagacaatattattgagcatctactatgtgccatgtgcctcctccgagctgagaacaggaagctaacaaggacctaccctcaggaagctcacagtctccttcggaagacaataaatacaggaacaaagcaacagctaagagtgactcggaagacaataaatataggaacaaagcaacagctaagagtgactcggaagacagtaaatacaggaacaaagcaacagcgaagagtgactcggaagacagtaaatacaggaacaaagcaacagcgaagagtgactcggaagacaataaatataggaacaaagcaacagctaagagtgactcggaagatagtaaatacaggaacaaagcaacagcgaagagtgactcggaagacaataaatataggaacaaagcaacagctaagagtgactcggaagacaataaatataggaacaaagcaacagctaagagtgactcggaagacaataaatataggaacaaagcaacagctaagagtgactcggaagacaataaatacaggaacaaagcaacagctaagagtgactcggaagacaataaatataggaacaaagcaacagctaagagtgactcggtggaggaaccggttagggtagtcagggaacacttctctgaggaggtgacattcgcctgagacagaaggaatgtgatggaactgaccagaaagggtagagagaagagtgtcccagttagcgggaacaggaggtgcaaaggcgctgaggtcagagcagggctccatgtggccaagaagccccaaggagatcagtgtggctgcaatggagggaggagacaggggatgagtttgagagtaactggaggccggagcaggcagggacttgaagactgagtgatgtactgtgggtttcattctccataaaatgggacccacaaaagtgtttctatcagggatcatctggtcaaaatcgcattttaagtagctcactttggctgctggcaggaaactgcctggatggggcaaaacaggacatcgggagcctagcattgggggctgtcacagcatccaggggaagggtggctgcaggctggaccagggtgatggcaatggccatggatggtccttgaaattgtgcattcagcacatctttactgagctcctattctgtgccagccattggggatgcagaagccaacaagagagaaattcctgccttcacagggcatgcaatctagaggaaagagaatggtaactgaatataatatatgccagtggtaagtgacgacaagtgctgtggaaaaaatcaaagcagggaagggtgtggagatctgccagggaggagtggggcaatttgtagttttaaacaggagagtcgggaaaagtctcattgaaaaggccacattttagtgaagatgtaaaggaggcatgagatagaatctgggacagagagttccaggcagaggaaacagtgagtgcaaaggcccggaggcaggcccactcctggtttgtttgaagaaagcaaggaggtccctgtggctgagctgactaagctggtgggggcgggacagatcatgcagggaaggaagggaaggaggaaggggctgaatgggcagaagagactgggacctggatgcctataggagggagggaaaccagcgagacagggcctggccccttctccatcctgctcccccgacccaaggaagcagcatctcccattcctcctttcatcccacaaagcttcatcagccaaaaagtgaaagtttaaaaagggaggaactgatcccaggagaggcagggccctgagatttgcctgaacccaggtcagaccccagcccgggtggggtgtgacttcctgtggctctgatggaattctcactgtcctcctcaggatgcattcctgggcctgaggcacagaaagaggacacacagccaatagcagccagtttcagggctcctaagcctgctgggagacacccccagcctcaggcagtgctgtcggggtgggctacctaagctgcaggtgagaagaatggtggctaattagggtgctgcctccttctcactctccaggtcccagggataccctgagttggatttcaggctcattaatgtcttggcagagaggctctggctgtgagctctctccagctgcccagccttgcctggcaggagtagggaatagaagggagactcacaggggagtcatctacccccagagtcagtcccaaggcaggcccagggttgaaggacgtcctagaggacgtcctagagcccagtgacattggctgagacactctccctccctgagcccctttgtccctgtctctccaaggggatcataggccttttcccacctgacttccagagctgggatgaacccaaataaaggatgaaagtgaaagtgccctgaatcattaaagagacaggcagaactccctgtgccaccctggagggatctgcaggatgggttgttacgtaagacaaggcgccttgcaacaactgctgcctggctggcctcccagcttctgcccttccgtggtggctgttctcccctggtagcccctggattctgttacataaaataccaggtcaaagaattcccatgggacccagcaattccacatctggctctatacccaaaagaactgaaagcagcgtctcaaataagtatccgcacacccatcttcatagcagcatcattcacaatagccgaaaggaggacgcaacccaagtgtccactggcagatgaataaatggataagcaaagtgtggtatatacatataatggaatattattcagccttaaaaaggaaagaaattttgtcacacggtacagcatggatgaaactcaaggatattatgctaagggaaataagccagacacaaaaagataaatactgcatgattccacttatatgattcatcttgagtagtcaaatccatagcaacgcaaagtagaatggggctgggggacgggggaattcgtgttgaatgggtgcagtttcggttttgaaagataaaacagctctgcatgcggatgatggtaacgattgcacagtgatatgaatgtgcttaatgccactgagctgtacacttaaaaatagttaaaatggccagttttatgctgtgtatattctaccacaataaaaaaaattgcaccaaaaaaccccaatgaaaccaatcctagctcagtcctctcctctgctccatcttcctgaggctctggttgtatgccccaacctgcattccccatgccaccccatatgttctgcactgcgcctccctgacccatctcctgcccctcccctcgctcactttgctccagccctgctggcttgttcactcgttctccaacccactaatttcatgccatgcttggggccttggcacccaatgtcctctctaccaagaatctgtcctggatatctgcagggcttgttcctccccatcctccaagctcaagtcaaatgtctcctcagaggagacatttccttgaccccctggactgaaagcacccccccacaaccccactcctatcctcctctatccctttacctaaatgtatgtctttcataacatgtattaatatcactacctggaagaatactttagctttgtctgctggctactctgttagagtgtcagctctggagggtaggaatctcactttttcatgcctcacaacaatgcctggcacatagtaggtgctcaatgaatagttatcaaataaatggagaatgatcttattgatgtatgatgcatacctatgacacacatgttatatctgtgcagatgtaaatatatgggaaaggcctggaaacatgtccaccaacatacagtggtgaaccggggaggagggtgggcaaagaggatgggggagtggctgtcaaggggccctttcagggttcactgagttcactcagctgctgcatgcaactcttaccatgcagatcataggtatgtgagttttaaaaaagagctctgaggtgatgctatgtcccatgtagcgtctatgagtgattctccccagcctcccaactaccctgcaagggcgttgttactcctacccttctatgaagcgaagcgcattctgcattccccagagtcaccgagctcctgctacacaccaggcatggttctgggctcgggagacaccagagtgaagaagcaatcctgctctcatggagcttacacttcagtggggcagatgaacaataaataaataattaaaacaagtctgttggggcagggaacagaatggagaagtgtacagagtgaaggggcgagagtagagagagcaagggaggtgagtggaggtttgcaatttaacagcgacaccaggaaagccctcactgggaaggtgacatttaagacctaaaggaggtgaaggggtgctctgattttactgtgtcccctaaagctcatgtgttggaaacataatcctcaatgcaacagtgttaagaggggcactttaaagacatgatcaggtcatgaggactctgccttcatgaatgaattgacgctgttatcacaggagtgggttactgacagagtgggttcctaggccaggcgtggtggctcacatctgtaatttcagcactttgggaagctgaggcaggcggatcacctgaggtcaggagtttaagaccagcctggccaaacatggcaaaattctgtctctactaaaaatacaaaaattagctggatgtggtgtcaggtgcctataatcccaggaggctgaggcagaagaatcacttgaacctggaaagtggaggttgcagtgagcgagattgcaccactgcattccagcctgggcggccgagtgagactctatctccaaaaaaaaaaaagacaagaaaagaaaagaaagagagagtgcattcctaataaaaggatgagtatgactcccttcttctctctctttctttcccaacccctttgtccttccaccttctgccatgggatgatggagcaagaaggcccttaccagatgcagcccccctggattttggacttcccagcctccaacccatgagccaaagaaaatttccattctttataaattacccattctgtggtatagtgctatagcaacacaaaacgtacttagccagggatttatccaggcaaaggcaagtgcaaagtccctgaggtgggcacatccctggtgtacaggagcaatggccaccgtggctaggacacgttctagggggagagtggtgggcttggaatggtgaaatcccttgcctcacaagtagggcagctgagagcaatatcttgggcctgtctgactgtaaagtgaagcttttaactgcaaagggcctgacactctttctagtgaggaaagccagaaagggtgagcgtatgttattaccaggcattgcgccaaacacgttggggaatcacatgggggaagcccccacccttctggggctgctgctgccgtagagaggaagggaaactgagaagtcagctaagagcctgagcagatactataagaatccatcgtgattgctgttttccgtttctctgtgtgttggttgtggaaggagtcttagcacgtgtacacacagcatgtgcattcctacctctgagtgtgtctgcctgagtgtttatggctgcataggggtcttgagtctgctgcccacaagttaaacagtggtttacttagccctccccaactgtgtgaatgcaagtgtgcatgggcatcttcatcttgtctttgtgtttatacatctctgtgtttatacatcccttgtctttgtgtttatacatccctttgtgtttatacatcgtcttgtctttgtgtttatacatacctgggaaggtatccatgttcatcaggaggcatgtatccatgtctgcatgtccaaaatgagtgtgtgtcattgtgcatgtgtttcatggatctgcacagctgttaagagttctgtctctgtagcctgactccctgggttggaatctaggtctgccacttactgggtatgaccttgagcaaattactcaaccccctctctgcttcactttccttatcagtaaaatgggcatattaataaaacataccttataaggttgttgtgaggatcaaacaaatgaatatatgtggaatgctcggattgatgcctggcacatactaggagccatgtgtgagccgttgtgatgttagggctctttctgcgtgcatgtgtctgtctgggtctatctggctgactgagcacacttgccccagctgatatgcctcgtagcatgcaagttggcatgcctaagttcacaccttacctacgtctctgtgtgcacaacctcagtcttagccccgcatgtgcagtgcccagcctcctctgcctgacaagagcaaatgtggctggctggggtggggactggaggaagggccagcaggagggggctcctgccatggcctggccagctggacttttcacagcccagtgactttgtccctctgatcggccaagtggctagacaggcaggcaaaggaagtgcccctcttccaggctgtccccggcctgtgccatctctatccctgatcacagggattgggtttacacgcctgatgcccctcgggattgggggatccaagagagcagagtcaggcctgagccacctttgtgtccccacatcatagctgtcactgttaatgatggctaacacttactaaggactggctgagaggcaggcactgtattggttctgtattgatacatggtctaacttgccaatcctcatgccatttccctgagataggtccttccattgtccccacttcatgggtttggaaactgaggcacagagaagcgaattgtttacttaactcacacagctggtaagtgaagagaccagaatccaagctgattaaatacatgttaagtgacccagctcattgaatgagacacagaagagccatgtttgggatggagtggaaagatggagaacaaggtggagagtggttctggcagaggaaggggccagcttggctctctgcaggggagccctgggaatgggaaggaaaaagtggatggggccagatggtaggggtctggaaggccaagtggggaagcttgcatctgagctggctctactcttcagagacctggccacagtgaggtgccatggggaccggccacctggatccttcattgtgaataaactggtgaactgagcccaggtctctgggagagctggtagctaaaggcagactaacagaacaaaagctctgctgtcagtctgaggttggaatcccaatgccctcaccccctggtcacttcctactatgaaacttccattttctcatccaattcaacttgttaaaatggttaaagtcatccattatcccaatgtctgacatatagtactcaataaatgatcatccactctgaaacaggggctttcaaataatggtaataaatagattaaaggatctagcagaaaaggtagacaacatacataaacagatgggaagtttcagaagagagaaggaaactatgagaaacaaaagagagagagagctgactggaagtgctggaaccagcaagaaaaagataatatcaaagaggaagaattctgttgatgggattagcaacagactggacacagaggaggaaagtgaaacttagtgatgggtcaacagaaattctccaaactgaaaagagaaaagaatgaaaattcacaacgtagctttcttagatttgttaagagggtgaaggccagtgtcagacacattggattaagtagtaccattccttcaaccatttaacagaagtacattgagctcctattatgcaccagacagtgtttacagtgctagaatctcaacagtgatgaaaaggacaaggtccctgccctcagggagcacacaacctaagggaaggatcagactcctaaataagtaaaatacatacatagtatattagatggtgtattagtctgttctcatgctgttaataaagacatacctgagactgggtaatttataaagaaaagaggtttaattggctcacagttccacatggctgaggaggcctcacaatcatggcagaaggtgaatgaggagaaaagtcacgtcttacatggcgcaggcaagacatcttgtgtaggggaactcccctttataaaaccatcagatctcatgagacttatcaccatcatgagaacagcacaggaaagaccaacctccatgattcagttacctcctactgggtccctcccatgacacatggaaattatgggagctacagttcacgatgagatttgggtggggacacacccaaaccatatcaggtggtgatgtgtcctatggagaaaaagcacgggagcaggccaagaagagtagattcaggggatgcaattttaaataaggcggtaggtcagggaaggcctcaataagaaggtgacatttgagcaaagacccaagggaggtaatagaggaaccaggcaaatatttgggggaagagcattccaggcaaaatgaacagctggtgcaaaggtcctggggcataaatgttcacagacagttatgccccagggaaagcccagaggctgaggtggccagagaggaatgatcttgaatgatggaaaacaaggtcagagaggaaggtaaatgggaggtggccccccaccaccccaggagggaagcagattatcatgtagggattttggcttcagctgtgagatggaggcctttggaggatttccttcaaaagagccacatgacctgacttctgttttaacaggattcctctggctgctacctggagaatggactggaggggcccagggtggaagcagggaagccagtggagagtctgtggtgacgatccaggtgagatatggcacctgggatgaaggtggtagccatagagatgatggcagcttttagatttggggtgcattatgatggctatgctgatgtcaggagagctcttattgtttttatatgtgttgctgttattagggctagccaggctcccacaaacttttttcaaggagccccaacccagacaagcaggagtgaagctgctcacctggccccacctgccaggggaatcttgctgcacttgttgggtagctggtggccaaggtccatctccccagagcccagccctgtaggctcctcaccctccaggcagcccagggcagctgcaggctcaaggttgctctgagcagcccccagctccacagctgtaaggttctagttgttggtttactcagaggcagcagattcatctggagaatctggtccctgcagccccaggtgccctcatctcacttcctaaacattcatgagaggggaggcgggcaacctcctcaagacacctcgactcagatgcctgattcctgccgccacttgtccacagcactgccccatctggctcctgccctccacctgacggctgtcatgggctcctgctggtacccctgcatccatccaaccctttcccatccaccccactaagagcaggaatgggccattctgaagagggtgacaatgtcactcagcgagtgcttaaaactccaccatagctccccctggcctgggataacatctagaacattaatagtggccttcaaggccctgtgtgatctggtcccactcttcatggccttcttgtccccccaccccaccaccacagtacttgccagctgtaagaagctgtacctaaagcacccctgcagaactttgcacagttgctcctccaggttgctctagcatggaatcctcttcctgcccttctctacctggcaaactcccacttctctgtcacctccagggtcactgccgtcttctccagatggctggaactcaccccaggctaggctccctgctggctcccacagctccctctgctctccctccttattcagctgcactatattacaaggataatgacaacacattggcaggcatgccctgctcccattgtccatggcagacatcactaaacgatcagggtgttcttcccccctgagcccggatatggcctcaggaatgcagcattctagagctcatggtaatcaaaaagaggtcgggtgcagtggctcacacctgtaatgccagcacttgggaggccaaagcggaaggattgcctgaggtcaggagttcgagaccagcctagccaacatgacaaaactctgtctttactaaaaaaaataaaataaaaaattagctaggcatggtggcgggcacctgtaatcccagctactcaggaggctgaggcaggagaattgcttgaacctgggaggcagaggttgcagtgagcagagattgtgccactgcactccagcctgggcgacagagcaagactccatctcaaaataaataaataaataaataaataaataaatataaaataataaaataattagaaagcctcctgagtagctgagattataggcgcccactaccacgcctagctaattttttattttatttttttagtagagacaggatttcgccatgttggctaggctggtctcgaactcctgaccaggaggctgggagggggtgtaggaaaggcgggagggggtgtaggaaaggcaggaggcggtggcagccgggttggcggggtggggtagggggtggggaggtggggaaggaggatggggttggttatcaggttctcgtcctgaatggctctgcctctggctttccctgtagcttgggcagatgccttctctcgggacctcagttttcacatctgtgaaatgtggcaatagggccaagttgtcagtgacattcttcccagatgtctcccaagtgtcagggctggatttataagcacctactcagtgccaggccctctgtgttgtcctggagaaagagatgaataagacacttaaccctgccctccaggaagccatggactaaaggtgaagggagtgtggtgtgtgtgtgcgtgtgtgtgtgtgtgtgtgtgtgtgtgtgtgtgtgtgtgtgttgcatgtaggcaactggggatgaaaaaatcagttttaacctgtcacccagctgaggctctctaggctacttggagcttcctggaatttcctttgtgtctaattgcaattagcattctttcctgtctagtagatgcaatgtgtccctcgggaggaaacgcagagaccactgcggagatgttccaggaactgaaacctttgccttccctttagacttgcctcctaactccgtctacattaaccatatgtctaatctcaagtcaaaaattcaaggtttatagggtaggggctaggcttgtcagcatttcccaatgatgtcctgtcccacgataaaacaattctggggacaatacattctggaaatgctacatgaaatctccccctcttgaagcttcacattacacatttgcatatagaagaatctaagggaagcaaaaaaaaaaaagtttgtcaaactttgcttaatccagttcttcaaacttatttaaccacataactctttttctcaaagttcctgtttgcatctctgtcagttatcatgctttaacttgcatcagaaacctcagtcaagctggtttatgcaaccggaagagtacattagcttttgagactgaaagtctagaaaacataagggcctcaggtagagttcaatcaaggcctcggctccatctcttgaggcttcccttgtgtctctatccccccttctgtacactcgtaagcttcatcctcagcctggtttaccccataagaacaaaatagctgcagcagttctgggcatcatattcaagtaccccactgcacaaagaagaggagccttctcttttcattacagactggatgtccttgctgtatttagaccatgtacttatctctgagccaatcactgggcaagagaaataaatgggcatcagccaatgagagcttacccctgggatgaaatcataacatcttccacaaagcctatgacaatgtcttccttctagtaacacatatcccagtaatctcagctatcccatcccattctttgctaaggaaactgatttgtgtccacagcactggtgagccactgatctcaaagagggtaggcccctaacatgaactctgggggtgaatcttgattggtccaaagatcatggtaaccttatttctcttcaccaacgattggttcagagatggccataggacttggttctagctaatgagatgcaagcatctcctgggtggggcttctagaaaagcttttgtcttctggtgcaaaaaatagacttagatggcatattcctttgctccttcacctttccttcttcttcatacctggaatgaggatttgatacctggaggtgtggcagccatcgtgggaccaagaggcaaaaactgcaagaataaatgccacagtcccagagactgcagaacagaaaaatagagcccaaaggctagacaacattgttgggcagctgtgcatagtctggaatgctatctcttgacatcttattatgaaaaattggattggaaatacatatttgtttgagccaaagacattcattactaactgaccaaagccaagtcattttttgtaaaataggacttgtgagagccttgagacacagccttgaagacacagcttgagtatccttgaattccagatactttcataaacaagttctgcccaaagatgttataagaaagcagattgtccaagctttgcatccaccccagcaaagagttgagtgttccctgtgtgagaggggcaccaggagtcatggagcgtcaggctgggagcccaacaaatcccatggcagagtgtcccatgttgctttgaggtttatagaggaagctatgacaatgccaactcaaaagtacattcttgaattcagatactgattgagatgcagcgaaatctatccacagtcttaagctcatctcactcttcttatatcctagtaatcttacttctgagctctcttctgataaaataacccataataagcagagaaaaagccaggaacataattttcatgacagttacatttacaatatcctcctcatcctgccccagccccaccaaaaaaactggacaaatctaaatgtcctataacagaggaaggattttaaaactatctgttcagtggaatattacatgatcataaaaaatgatgtttgcaagtttataatattatagcacaggggaaaagccggctgtagcattatatatattatgtataatctcaattatagaaaaattgcatgagggaaaaatcaaccatgaaataaagacagtaacatgttaatagtgattatgcttggttaccgttattatgggtaatttgttggggaatttttcctgctgttatatattttccattttacctatatgttctacttttgtaagcataaaaaataaaactggctcttcttttaaaagcttccaggaccctccaatttgtgagatcattgctgttgtctctcctccagtaaagcaggtaatcaaggactgcccagagctggtgaccccattctgcaccaggccaaaataaaaacagcttccaactccagcatatttgattaacagcttgaaattctttcaagaggcaaaatgaatggtagggaaaggggaagatcaacaccctattgttaaatggtgatgtgagcttgcaggaactaaaggcaaaaagaggtacacaccattccctgccttatgcaaatcgatgcaaataggacacactctctggctaagcaagaattccaggtctgagctcccacctggatcctgggtctcactgaggagggaaggaagcagtgagaggagggcatagtgatgaccccattcattgagcacctactaagtgtcccacttgcaaagcattttcatggcctggagctcgtctaccactcatcaccgcttgtgatgaaggtaatattatcacccactgtttgaaggcaagtcaagtggagctcagagtgggaagtggcctatgcaacgtcacagcaggaccagccaactccaaagccagtggtatctgatgaccaggctacgcaaccctgggatacaagtgcatatggtgcctctggtgggatctagggtcagtcctcagtgtggaggagagaagagatgtataggttgtcgggaccacaaagcatgaaggtctggaactcctggatgcaatgttagacatccaggtggaatgcttgtaagtcccagacagactttggtccccacctggcctttacactcattgggcctggaacacgccccctgcagacacctactggctcactataattccccagtcagctctctgctaaaaggttaccttatcagaggggcctcagctgactactctacctaaaagagcatcacctgctcacctctcccagctccaacatctctatccccgccctgcttggtttcgcatcgtcgtgcttgacacccctcgacttactacatatgtattcgcttattgacaagaaagtccactccatgagggtagagagttaacttttgggctcagctctgtgtttccaacacctggtacatacttggttgttcaagacatatgtgtcaaatgaattaatgaataaataagtgaatttcaacttccccagagcctagttacacaatcttggacaatgacccagcaacaataataacatagttattaatgatacatcactctttataactaacgtttctgagcacttttttttatgagacagggtctcactctgttccccaggctggagagcagtggcataatcatagctcattgcagcctttgtcttgggttcaagtgattctcccacctcagcctccaagtaactgggactacaggcacacgccaccatgtgcagctaatgttttaattttttatttttttttagagacagggtctcaccatgttgtccaggctggtcccgaactcctggtctcaagcaatcctcctgccttggacagccaacatgctgagattacaggcatgagccaggcccccagccctgagcatatatttgtacattcctttcctcatttgatcttcacatcaatcatctgaagcagagaacgtaattatccccattagacagctgcagggacgaaggcactgggaaggcaggtgctgcccagatcagagagcatcgctagcagagtcaggacttgaatcaagcatgtctgattctaaaacctacttgcctacccaccatgtgatgcccaggtcaattccacccaacaagagggcaggcactacatctgccttattcttcgccatattcccagtgcctggcaccaggtgaattgcccttggaaaaggatgagagaaatcagtggttctggaagtgtagccccaggaccagcagcagcagcagcacttgggaacttcttagaaatgctgattcttggttcccattgcagatctactgaatcataccaatgcacgctagagtgtgagaaccactgggacaaatgggcgaacgtccccaagcctgatgccccatccataaagcaaggctgagcacccatgggatcagagggtaaaatgagaacttcagccagcgccagacctgccaggggtttgagctatcctgattccttcccacaagcaattggaggacaaattttcagctctaatttcaggcctttgatttcggcctcatctggccaggaagatgccagcttgtcagagagagtgggaggccaggagtgatggagctggagcaggagaatctattattaattaccatgtaacattgattaagagcccacaaggcaccacagctgcgaggagctcaggagagcctccgctcctgcctggaggggaaaatgattagcaacattatgaaaggaaatattcatcctgtagcggccctgagcaaacacctccagggatggggaattttcctctcccagtgatctttgctcctggagcgggggcagctgcctccgtggcctgggacagacttgtcgagctaggaaggtggagaagctgacctctgacccatctgcaggtgtcaggttgacaggtcagagagtgcagctctagggggccagagatgcccaacttgggctcctgaaaaagcagtttaaggtggcaggatctttctgaattttggaaagaaagaggcaatctggatttggttttcaattctccaaatttttaaatatggttaagacagattctgggttggcaacttctgtagctactcagctgccctcatcacatttaatccttccaacaactccgtctttatcttctagatgatgacactgagcctcgaagtggtcacttacatagcaagtcagtggagcagctgggattcaagcctatatgtgcttcctgaacctctgctttctctactgaatcactcaggtatattgaggtgccctgcccctggtgttccaaagccacccaaacaaattccaaaaagtttatgactattgcccaatccaagctacatccctgcaacaggatcacacccagatgtaacataaaaactcctagtcaggcaacatgtatggatgtgtgaatctgagcacctgaccattctaatacccacactgtgctcctcccagaagcttgagtgtcaaggagctggccccaacctcccagtggtcctgcttctgacctttgatctcacatttatttccaagaggatctagtggaattaaccagtcacctctccctttgctccacggaactctatttttttctgccactgactagctgggaagccttaagcaagtccccagccttctctgagattcaatttctccatatgccaaagaggactatttggatccagggatcaagctgctggccttattcattctatggtcaagccactgaccaagtcattcctaaattccagagtgagaacagagacttcataggtgataatgatgatgatgataaaaatgataccaagatactagttaactatttttaatgctacctaagtgccaggcactgcgtgtggattatctcttttaatcctcacagcaaccgtatgaagaaggtggtcttggtaaatgccatttcacagaagatgagactgaggctcaggcagaaaaatgactccagagcagacacgcagagcctccactctggtgtccaccctgtgccctctctcatgttcacaaaatgtgaggtttgttggctccttctagatttctccatctggaattcagaccataacaggtccctgggggctgagcaagctgctctgtttcccaggaaaccatgtggagccttgaagatttattaaggaattcataaatttgggggagagttttaaaactggtacagctggccacagatccccagggaggtagcaagctccccatccctgcaggtgtgcaagctgagaccaggcagtacatttggtggaatgttgtagtagggattccaacaccagatgggaggcaaagaggatgagctacatcagtgactttttggaaaaaaacaaacaaatacttgttaagagccagactgcctgaattcaaatccctcttacttttctgagtgactttgggcaagttactagacttctctttgttcaatttccttacctttaaaatagaactaataatagtacctacctgactgcattactgtaagattacataaagtaatatgtgtggaacacttagaagagtgcctggcacatggtaagtctataaagtgttagctattactttcaaacattttatattaactttggagtcctgtcttccattcgaaacttcagtggatactgatgttacaacaaataaaacaaagaaaagctgactgacctgaagaagtcaggggctgggagcactggagccctgtgaaatctgaccccctcctgcaatagcctgcaaaaacactgccatggcccgatgccaccacaggcgactgcacctcagtggctgcgtccttgctgtcaaaatccaatctgctcgggcctctcaaaactatgcattcagtgccacatttcacagatggggaaactgaggcctagagaggcctgctaaggttaccaaccagttaagagccaagttccctctggagagcagaggggctcctctgccgccttcccagaaaaacaaccaaccacaacaaggtcacagtcccagtgcgaactccactgcccctctcgacattgccacagagggacccagagagcctccttaatgcccctccctggtgcaggacctcccactgcaggaagctggttttggaggagggaaaccagcttttgctgggaaatcatcaagaggaagtaatacttagagaaaggaaagaagggtagcaggaaccagagctaagcctagcagaacgggggcaggatgaggctgcaggttgggggtgggggcagcccagagcctccacctccccacacagaaaagcttgatcagccctggcccagctccagacaccaagcctgggatcagcaatcctgggagagcccccaaacttgccaaaatttcccctgctcctggactctgctcttcctgtgataagacccattttccgggaagatgtgatcacaggacactctgcctgtgagtgtctgataggaggattccatctgagtcctctccgggaaggcctgtaagacccaaccatcaggatccagactctcatcgtacaaaggggacactggcccagataggggctcatctgaagttacacagcaggttgggacaaagctgggaccacccccaggcatttgaggccttactgttttcaccaacatcaaagtcttatcttagtaaccatagtcataataataataacaacaatcataagacggatatatatttatatgtacatataaaatttgttttttgagagaaaaagaatttcctgatttttttaacttttttttaactttcaggctcaggggtacatgtgcaggttcgttaatacaggcaaactcgtgtcatgggggtttggtgtacagaccattttgtcacccaggtactaagcatagtatctgatagttatttttcctgatcctcttcctcctcccgctctcctccctcaagaaggcccagtgtctgttgttcccctctttctgtccatgagttctcattatttacctcccacttataagtgagaacatgcagtatttggttttctgttcctgcattagtttgctgaggataatggcctccagtttcatccatgttcctacaaaggacaccatcttgttcttttttatggccgcattgtattctgcagtgtatatgtacattttctttatccagcctgccactggtggccatttaggttgttaagagctgtattttttttgaatgcctacaataaggcaggcactattctaggtccttcagatgattgaacattttccaccctcataaaggaactccacagggaagggtccgcatccccattttacagatgaggaaaatgaggcacactgaagttacagaatgtgcctgggaccacacagctggtattcggtagagtagggattcagacccggcagcttggcttcacaacccatcttgatcactacactgacagcaggaagaggacctgctttctggaagttccagcatcactagtgagcatgggtgaaggaggcttcagggtttgggaaatcggcctgtggctgtggaaactatgtgtggacagcttcctcccacacagctaatagttattctcatgctagctgcaagaaaacccagaacactaactttcccagcttcctttttaactaggagtggcatgtgaccctcgctgatctaatcaatgagatgtaggtagaagtctcagaaacagtcttcctccacagttaaaaagccctttcttttgcgtttatccctttcccttcttcctacatggaacagggatgccatgcccaagacctggcagtcatcttgcaaccatgaggcactaggaatgaggataaacagctacaggctaaagatggcaaagacgaatggcaagcagagcctgagtctccagtggcatcagtgagagccacactggtcccgggtggcctgcccaggacttataagacaataaacaccaattggattatgcctctgcagaagggtttctattatttctagctgagttcattcctaactttcccaagagtggggtcaagataggacccagggactgcctgtcaccgagctcttgttccctctatggaatcacactacctcccaggggatgtacctccccctttctatctcttccaaaatgcaccagcattaggcgtttgcctggctcagggcctagaaaagggtgctgagcagttgttcctcaggccacgtagccactagacctgcccatgtgaacccatgaggagtgggggtggggtcttgccctgaacccacctaccatgaaaattccagggtcccaagtatccaacagattggacttccaggaaacatatttgatttgacttgtaataaccatccatccatcattctaaacaaataatagcatacatcattctaaacaaatgtttattgaggggatgcccagtttcaggtgctcataagtgaacaaaatcagcaaagtccctgtcatcagaactcatatcctaatgggggaagcaaaccataaccaagtcagcagagaggtccctcacctttacaaggtgctttacagtttacttttaagaatttatctgtcctttatcctcattcctagtgcctcatggttgcaagatgactgccaggtcttaggcatcacatccctgttccatgtaggaagaagggaaagggataaacataaagggaagggctttttaaggagacctaacttcgcctcctcaataactcctcatttttccattttgccaaagaaacaaaggcacaaaacggggaccaagaagaggcttccccaagatcacccagccatgtccaggagggtcagtctggcagcaattgccttccccagggcacatcctctgtctactagaataatcaaataagtccctctgccatggggatctgttgctctgggcaccactgagacagccatcagaaacaacagcctctacccaaaatcagtgttgggctgggatacagcattgtcagctacacaaaacccccctcatcaagctgttggcgcctggtggctgcttaattattcatccctgctgaacatgcaggcccagggcttcagccatggtttttggagctcaaccatgggggagcctcggtgataagcccagacctgttaagaagtttggaatgtatgtgtctgcccacaaattgttccctggtcctcccacaccagcctcgtcaggcatagtgaaagatgacaatgagccaggaggcttcagagacaacagggcccaggctgtgtttgcaatgttggtagctaaaactgctcggcctgttttccattcccatctagcccaagatctttcagactttgagctaagcagagttttaggcatgttgtgagggttagtgagggaagggggtggggagtcatttcttcaggggagtggtggtggtggtgggcagtgactcaaagaggccaatgaacgtagagagaagagcttcttttgcaagatggacagagccaaacggacctggtttcaattggctctgtcactttccagctgtgtgtccttggacaagtcacttgccctttctgatcaaaggcctcaaatataaaatggagattcattcattgtgtaaatgtatattgggcccctgctatgtcccaggcactgcggatacagcagtgaaaagaacagccaagtcctgttctcacgggggcttgtgtaaagagttaatgtatctaaagtactgtgtcccacatataagtactcgattcatggtcattatgacttttgttattgtcagaggatttaagttttacacatacaattatttgctgttacccacctatatgattattattaccatggcagaaaacgccccctctacccaccccacacatatatacacacatacgcaactcacacctaagccattatgaaagaattcatttcctcctctaaagttgtctttggcattcatttttcctggtctgggagtttttaatttcattcatttccccttagtcctaacccatcgtagcttgtcctaacctaacccagtatatagcagagaccaataaatgttttcttcattccttccttcgttcattcatttacttgacaaacatttattacttcctccaacatgccaggccccgctccgcgagctggggaagcagctgtgacccaaacagacaatgtcaggcgatgtctctgctctcatggggttgacattccagcaaggaagacagacaacaggaaggcagacagacagatgacagatagacagaaaatataccacactcacaggcagcgcagatgctggaagagaaaagcagaggcttcaaggtgggggaggcaggacgaggccattccagactggctgggcggagagtccctgctgaggaggtgacgtataagactgggtgggacggagaagggagtcctgtgaacatctaggggaagaaagctccaggcagaaaacacagagtgcaaaggtacgaggaaggaagaagcttggtagggtaaaggaacccatggggcagcctgtcccaggttcccaacttgtcaccttgggcagtcaggcgaaagcacaaaaataggctccagtgatggctggcacctccttaggctcacttagattcctacagtagggatccaatgcgtgactgcagcctccaaccagtctctgaagaatggagagaacagggaccagagagggaaggtgatttccccgggtcacacagccagcagtggctgggctggacccagatcccacatctcttaactctggccagtggtgcctcccctaaaccacagttgttgtctttctggaaggcagaatgaggggtccagaaagatcccaggagacactcagagacacacaagttaggagacagactggagagataggaactcgaaaccttccccactcccagccatgcttgtcctcacactcaaagaaccacaggaaccagacagcagcctccatcctggctctgcatctgggaaccatggttacggctgctgcttgattggcagggggtccagacacattcgagctaccccttgattcctagaggttgtgtgagaagcaggagcaagggccaggagagaagctgggggtcaccagcaggccccaaataccaccctctaacctttccctcccaagccaatcatccaggcacctcgcactgccacgaaatcctttttagagctctgaattaaaaataaatttgcaagcacataaccagatgttacatggggaaaagataaataactcagcctgtcaaggaactgcctcatctcagtcaaccctctctctttcacaaggttttaatttttaatttcacagcggtaactatagcaacctgcaaaaataatatattccaaagcaaaacaactttcttggctctggcttggcatctccatgttccctccttccctcctctccaccaacttcacgcaggtctgtgcccagagttgatgaacgctctcagctttgaatgccctcattcattaagtaattaattcattcatacacaagtatctcttgccatccaaatccatagaactcctaaattcaggtagcgggtattggacaatggactcagaatcatgtgggatgccatgttgtcttaacctattttgtttctaggttttgagtacataggaaaatttggatagcaagggacatctgtattcattggggacctaatttgtcccagagtcagtgctaggcaggccctggggtgagagagaataggactgatcctgcccttaaggagctcacagtcctgttggggagacagaatacaaacacataattacaataaagtaatataagtattgtatacaagggaaaaataatatacaaatggggcacaaaagaagggagaggctgtcaatatctaggatgatctaggtaggcttcacagagaaggtgacttctgagatgggtcttgctggatgagtagaagttttctgaatgaccagcatagggaagggcacatcaggcaggtggaacagcacgtgcaaaggcagaaacagatgacataggtcagtatggcctaagcataggatgagtcatacttcaaaaagatactggagaggttgacaagggagaaacatacagagccttgaatgctgggctgacttcagcttggaggccaggggaaatcagccacatagggagtagggcaaaacataaaaggccactctgaggacaagtgtggccaatggattagagggcaaagaatgcagacgaagcctgtgggggaattcaggtgggtggtggctgcagggaagaaaagagtgaaaaagtgtcggtttgggttccctaagaagcaaaccttgagccaaggatccaatcttatttgagatgtgaccccaggaagcactgatatggggaggagggagagggaagtgagacagggaagggaagaaggctcataaagtgtttattagaaagccagttagcaccgtgggccacgggagctcagtcctcctgggagttctgcgagacggcaccgagagtgcctcagagttgcccacttcaagggtaggaggctggaggatctcaatgccaattcctagagtaattggttggaggctactcccaggaggcatcaattcctggtgagcagggtccagtgccagataaaccctcaagcagagactcatgtgccagcagccagacacagggcccatgtgtcctgaaacagaaaagaaatgccaaggggactcaggtggggcattaagagcatctgcccctgtggaattctgaaagatagtcagtgggcatactgggagactccaacatctggcagagaggcagacgcactgacacacacagctgggacaggtgggtcatgggcaacagggcccaagtgaggacagacccatcaccatcctgtgcccaggctgcttaagggtcccagtgggatgctgtggctcctgctgcaaggaggctgagggaggaggatcacttaaggccaggagtttgaggttgcagtaagctaagatcccaccactgcactccagcctgggtgacagagcaaaaccttgtcttaagaaaaattaagaaaaaaaaaaagaatcccaatggggctcaaaggctgggtgacagtcctcagcacatccccctctcataatgggatagaccttctttccaaataaagagtcctctctcaagtaaacagagcttccctctatccctgattaaaactggaaagtggcaagaagaaaatgtgtcaagtaggaagatgcacatacaggatgtgttcatgcagggatataacattgatggtgaccttgtgtgagctacttcacctcccctggcctcagtttcctcttctacaaggtatggttcatagaggtgcccattgcattatcttgtaagaatgtaattcgatgatgcatggtgatgcctagaagtcacctaatcaatattacctgtgaatatcgttcttttctgcaatattgttttttagcatggtccacatgggaggccctggggagacagcaatcatcaagcagacttggttcctgccctcgtgctgcctccagccttgtggacatgctgaaatgctttatatagaatgttaaagagagccagataaaaaattatgcatagagcaagattctaattttgtttaaacacacacactcacaaaggcccaagggatatacaccaacatgtaatgatagttaacaccagatgatggaattgaaggtggcttgcagttttacaattctttcctggcttttttttccttttaaaattttcacagtggattgtattattcgaatagtcatttttgaaaaaataaaggaaaacaagaatgcttctttctctgactctctgcccatcacaaatttcatctgtttcctcgggaaccaggagctcctggcattaggggctgtttgcttgtacattccagggtctacccaccaggcagccaggtctcaggtcctggcctcattccctactgtggtgcacatttgaaaaggggctgggggttggggtggcctccatcagagcaacaaacctggactgaatgattggtgagtatgaagaggggagccctctctcaacctgggatcagctacctgtgaagacatgttctgtcccaggagtcagaggggagaggtctgtgtttatccatctacctgtgattgcaaaggtaaggctgtccaactctgaggatcagtgttagcagttccatttgcctgcatgcccaagccacgttctctaaacagctttatctgtaataagctgacattttgttcctcacctcttgactcctcggtctcctactgcttctgaacttaagtgaggaagaaagcaacattatatgtagatgccataaaaatcacatagtccatacctggctcctagaaattggctattaacaaagagattagacacctatttttctcaagtttcctcttttttccttttgacaccttgcttttctcttttccttttgacacctaggactgtgagatagacccaatgttcttggaaagatctagtaatctctcctgtagcgaacttgacggtattgtctgtctgagtccctttttcggaaaatggtccctcctccacaccatgtaaacttggggtttccatcaagatcaccaaaacaagagtggtcatgggtcccattcaggaccaaagtgattttctgggatgagtatgtggcatagatatggatacataatatatgtaggtatatgacatgtatatgatagatatatatacatggatgtatgatgtgtatagaggatatatgacatatatatgatatatataggatatacaatatatgacatatgtgatatgtacatggatatatgatatatagagaggatacatgatatatgacatacatattatagatgtacacagataaatgatacatatgcctcgctcctgccagccttgctgggcttgttgcatacatgtttgggtgtacctgctggtggcctgcttccctaccacacattgacagcctgcctggaggctaaagccaaccagaaaagatgaccctgttgagttcctgtatccagccattcctgaaaccaccttcctagaccagaaccaatacattccctcttttccttaagtagtttgagttgggtttttatcagttgaagctaaaagaatcctgactagcatactgcagtgaatatataccggttagaaggctgtgaccacccagaatccatgcccccttcctaagtaaccctcattgtttaggaaaatcacctctcctccattgaattcacctgggggaactgctgggcatgacactgctccttccttcactcctaggtcactacctacacccccacacaagaccaggtgaattggccatgaatcccttccaggcctgcccataaaacctcccccatgctcctccacaccctgtcttttcctctcctctgccgggggatgcagaagatcaaaaaagaaatcaagatcccctcccctggatggaaggacctgggtctctgagtgaccatgaggagttgacctacactggactgtgacctgagtgacaagtaaacagattatgagtcactgagatttgggggttgtctgtaacagcagttatcctgccctaactaacacaataggctggcacattggagagctacctgagagccattatcctaagagctttccattcaaccacgaatatttactgagtccctattctgtgcttgcaaagccccctgtgtttcctgttctcctgcactgcccacgattgcctctctcctcgtctggctgtcttctctctctagacggtaagttccccaagagatgggtccttatctgtcttcatcctctgcaccgtgtccctggtatctagtttagcatcaggaacatagcaagtgctccgtattgattgattggatttgcaaaatgaccagatgcataaagttgtcatgaggcttaagcgaggttctgattgtgaagcgtcatggcacacaggaggtcccctgcaaatacagtaaaaatgagctaaatcaaggtgcatgtgggctgggcaaggctttcagtgggagggcagattttagccaggacttatcctgccctataccctacagagagctaagttatctctggtcctggctggtcccaggctctatgcaggaggaaggatggggaccagctgcttcctggagggagccccagtcccagaggctttgagctgtggtaggggtgaggcaacacttcaggaaataacatttcaaaggctttggctgtgagagcagacttctcacccctgtcttgtgtggaggtgggtgtgggatgcctggtgtgcctctggggtaaagcatccctttcacggtttgaaatctcatctcgggaaagcttaactccttgtaccccattctactggctatagacaggctccagggatttagcccaagactcctaggataatgtccaaactccatacctggggtaggaatgggggcaggtgcagcatgtccagcatgatgcagcagttaacagcctgggctctggaggcagaatgcctgggttcaaatcctggctcagttcacatggtagctgtgagactttggatgactcagcttatctggacctcagttttctcatctgtaaaatgggattataatagtaacacactagaagattgttaggaagatgacctcgctttgacaactaatggagtgttcttttcttttcttttcttttctttctttctttctctttctttctttctttctttctttctctttctttctttctttctttctttctttctttctttctttcctcctttcctttccttcctttcctttctttcttcttcttttttcttttttatttcagatctcactctgtgcccaggctgaagtgcagtggtgtgatatcagctcactgcaacctctgcctcccagattcaagcagttctcctgcctcatcctcccaagtagctgggactaccagtgcgcaccaccacacccagctagtttttgtattttttttagtagagatggggtttcaccatgttggccaggctggtctcgaactcctgacctcaagtgatctgcctgcctcagccttctgaagtgatgggattataggcatgagtcaccacacctggccaagtgtgtttcttaaatgttttaattcctaacatggtaactatcaatagataaactgacataaacaaaattctttggggtccacagtaatttttaagagtataaaggggtcctaaaaccaaaacattaaaatccagtctcatgtgataacttcacactacacatgccagatgattcacctggcgtcaattcttcacttcctcctctcctcccccgaccggccatgacctagtttggaccctgtgctctgtccaaatgagcaactgaggcacctacccaaggaggccatgaggattcctccctccacacccctgaacagcagctgtctaccctgaattctgtggtttcactatccttaacgaaattgtacttactctgcaaggcccaggggcttctgcctcctgcaggaagcctggctgactgccctaaatggagcccttggtcctctgagctcacacagcactgcccagtcatgagggcagatggccaaggcagcttcatcagttttgcttgtgaaagcccatcttctcactagactgcacgctgcctctggctttggggtcagaacagagctgaactgggtcatgttgggcaagtcgctgtccctctctgagcctgtttccttatctgcagaatggggtaattatgagacttactgtgcagatcttgtaaggactggatgagcaaatgcactggattaatttgctagcgctgccataacgaagtatcacactcgaccagccgctgtggctcatgactgtaatcccagcactttgggagactgaggcgggtagatcacttgaggtcaggaattcaagactagcctggccaacatggtgaaatctcctctctactaaaaatacaaaaattagcagggcatggtggcgggtgcctgtaatcccagctacttgggaggttgaggcagaagaatggcttgaacccaagaggtggaggttgcagtgagccaagatcatgccactgcactccagcctgggagacagagtgagactccaactcaaaacacaaacaaaaacaaacaaacaaaaaacgaagtgtcacaattggctgtgatactggtgcttcaaaagaaaccaaccctgctgaccccttgatcatgaacttctagcccccagaattgtgagacaataaatttctgttgttttgtgccatgatgcttcacaattaaaacctcacttaagcatcacaatgactttgtacatctggtcattttgcaaatccaatcaatcaatacttattgagcacttgctgtgtttctgacactacactagatactggagacacagtatagaagacagacaagcacccgtctcccagggaacttatggtctagagagagaagatagggcagggccttgggggtcactctaaggactttcgcttttcctctgcacacaatgcggagccacaggatattctggtgcttcaacaacagaagtttattgtctcacaattctgggggctagaagtccaagatcaaggtgttggcagggctggtttcttctgaggcctctctcctcggcttgtagatggctgtttctttctgtgtctttacctggtcttccctctgtgtgtgtctgcatcctaatctcctcttcttataaagttgtccttataaaggacaccagtcatactgaattaagatccaccctcaatgacctcatgtaattaattacctttttaaagacccaatctccaaatacagtcacatgctaaggtgttgggggttggggcttcaacatatgaatttggtgcgggtgggagaagacataattcaacttatatggcatctaaaacattctgcctagggctgtcaggtgtaagtaagctgtgcttctctctccactgccaccagagcctggggctgcggtcagtggcttgggctgggcctttagagcctgaataaatcggtcatcagatatgagctgcccagggaggggacatgacctcaggcaagactgctctccttaactgggcaatctccaacagggactttgctgcaccaccaatagctgggcagtaagtccttctttcctgaggagagctgggcacccaccctgcccctttactcgctacatgaccatgggtaagctccttgctttctctgagcctcaacttccaaaactggaaaaaaaataaaatgacttgcagagggatgatgatgagatggggtcattgctggtatttttatttaggcaacaatttattttattgagcacctagtatgtgccaggcattgttctaggctctggggatatagcagtgaataacatggacaaaatctcagttaaagctgacgtcattacagggactgccaggcactaaacaaataagcaagtaaaatacatagcatgtcagatgctgataagtgctgtgaaaaagtagcaattaaaccaagaaaggggaagcgagagtgtgagaggcaggggtgcggaaagggggatgtcacaattttaaataagatggtcagggaaggcctgtctatgaaaagatttggcaaggtaagggggccctctagatatctccgagcagagctttgcaggcagaagggccgtgagcatccctgacgtggttcctgaatgcacggcctgagctcagtgagcaaaggggacctagactggacatgaggtcagaggagtggccggggtcagccagggcagggcctggcaggccactgtcagaacttcggcttttcctccacatgcaacgtggagccacaggagtcttctgagtgcaggagggggcgtgacctcactttgattttactaacacagggtaacccaggtgacaagctgagattgcagccggctcccctgctcccaccttccagccccgctgggccccacctagtaagccctgcccaagccgccaccccctctccacacacacacacacacgcgctccatcagtcccacgcctgcttgtccgtcaagtctcagtctagccctcacctcctcctttgggaagccagcccagagcccctgacctgcctcatccctccctccccagagaaccaggaggcagttaggggacaggccttggcaatcaagcgccagattcaaatcctccctacttagaatctctgaacctcagttttcttcatctgtaaaatggagataataataacagaccattaaaaacccaccctcaggtagtaagtgaaatccgaaggttcaattgtataaactacaccacagtaccatcacagggtcaatgaacagcagcattatcagctgctctgtgttgtcctgagagcaaagacataaagctcacaccgcccaccactacctgagaaaggtccaatggtcacagggcttgtttcctaacctccccccaaccccagtcaacccaagaccacccacacttgagaacaggggctggaccaaggctggctgctcatcaccacccaagctatgttcaccacgtgaccacagggctgtggcatggagtgatgagacatccttgggtgtgtgcctggcacattgcatgagtgtcacctgctgctgctgctgcacccatcacgccatgtaggaggatctccttcctcttacgctgcctccagcctatgagaggatgtaggtaatgactatgctcacaaatatcacaaatgctcggtatacagcaggggctcaataaatgcttgttagaggcaaccagagcacagccagatgtgtgcgtgtgtatgtgctgactgtaccattttccagatgtgtgtcccacagcccatcactttgcctctctgagcctctgttacctcatctgtaaaatgggaggactcattcttgcctggaagggtgagtggggcatccccagggctcctgcgccccagtcacagggtgaaggtatggcaccaatgtacccagaggatatctggcaggtgcacagtagacataatagtccacataatagtgacaaccagagccaccgtagcatctggcagagcagacttgggagtgagctcttgtgagtcacaggttggggcttccctgtgtaacctggtgaggctcacaggagtccaatggcttagagtggcagatagggccatgagtcgggccattgtctctgtgtcatcaatgattctgtgtttggtaggtttgctctagactcagagaagagcaagactcactgggagcctcttcccctctgctaagttttgaatgtatcccccagagttcacatattggacatgtaatccccagtgcaagagtggtgacatgtaggacctttaaggaatgattaatgccattatcatgggagtgggttggttatcgtgggattgggttcttggtaaaaggatgagctcagcacccttccctcttgttctctcttgcacaatctcttacccttttgccttccactatgggatgatgcagcccaagggccctctccagatgccagctccatgctcttggacttcccagtctctagaatcatagccagataaatttctattcattataaattacccagtctgcagcatcctgttatagcagcataacatggactaagacaccatcctttgccccagttcagggcaaagaggcctcaagaaacccaccatttgtgagaaacttttatgtgcttcctggactttctaggtatttactgacagctaactgttacggagcacttctagcactaggtactgctctgcgctcttgtaccgtctcagacaaggccccacaggaactccttgacacaggtattgttatcaccattttgcaggtgaggcaactgaggcacagaaagcttcccagagtcacacaggtagggcgatggagaaaaatttggagtctaagtctgagtccctgagctttctgcttaggaggcagcctagcctggtggttaaagctgtgaccccttccaaagccaggccaccaggggtcaaagctaggctcttcccctttgttctccttgcctcagtttccttatccagaaaatgggagcaataggacctacctcatcagactgctgtgaggattaagtgagggctgtgtttacagtgataggcaatccataatccataaaagtacacgctggtcctaccagattcctccttctcttagctcagaggacttctcccaatgtgtctctctgtcagtcttatttctctctcttgctctttgccatctcttctgaggcatataagcttctctttgtcactttcctctctatcttggtcccttctgggtcctaaatcctggctctgagtttatgtgctgcataaacttcagcatagcacagggcaaccctcctgactgtggatactctcaaacttcatagaaatttctcctggggaactggctaaatgcagagtcctggttccaccggagagaatcagattctataggtccaggatggggtgagagaatctgcattttaaccactgtcctctccaaaacctttcaccctgtgacctcccaggctggctcttgaactatactttgagaagcactgcatttgccctcagtttcctcatctgtcaatttggagtaaacagaaactacctcccaaggttgtaaagatgaaatgaaataatttgtctggaaagcaaacaccttttctctgtcttggcttttgtaaaatttattttgtctctgactttcccattctctgtttctggtgtttttcctatttcattctctgtcctctctctccctaccctctacctggaagtggacccaactccagagctgaaatggaaaacactgaacaggtgtggcccttctgtaaaggctggaggccccaagatcatccaaatggcctgtccagctccttcctactggcaccccagcagtccccaagaccaagcatccccacccctgcagcccccacagcagcaaagctggggaaagatggggatccattgtgcaggaacggccttgctgctatggaaaccagcactcagaaaatgctcagagatgatccattctggggagcggcctggccttgggggagggggaaaggccaaactctgcaccttggactttgccctcccattaccggccatgtgatgctgggcaagtcacttaacctctctgaaccctcctctccctcaccgggccccgagcagcagcctccattatcggtgggtgataaccgccgctgatgactgaacactgctctgcggctttcaagcctgaagacacgccaaattgccatttgctttcattactgcgagcttgaaatattctagtgccagcttgctgcatgaccctgtgcctccgagggccaccaaactatttccatgatagaattccctctcgcagaggtgcagagtccactctgagtcactctacaacacacacacacacacacaccacacaagcacacacacaccgcacacacagacactagctactgagctaagttgcccatacacttgcctcaccccggttgcgctgcgattcctcttctaggaagggaagaagtgagcacaatgtctcctgattactccatcagcagcgcccaatgctctgcagctgcagaacttatctcatggtgcattttccttcctcaatgtctcccagggcacctcccctccaagatccctcccacggttccccatgcctccaggcctaagtctaagctcaacagcctgaccttcgaggccctcagagccaactgcgcccttgctccacaatgtcacccctctatttgcgacagcagtccctgtgaaggcagggattctgtttgccattgtagctgatggaaccccagtgcctggtacatcctgaggccaggggagcagaggataagggcatgcatgagagggtggctaccacgtgccacccaccccagggacatcaagtaagacccttaccctccttgtgcctcagcttctcactcttcacaacacacagtaacacaccacacacatatacactctgaaactcacacacacacagcaacataaacacacatcccacactcccccatacacagacacgcacaccatggtgtacgaagagcatcggaccccctggccatctggccgtcccctgaacaagctgtgcactttcctccctccttacctttgctcatgcagtttcttcttccaaaaacccacttccaacaagttcttccagagctctcagggatcctctgcacgcaactcctcctcagtaatcaatgtaatttctcagagaacacgatgacttgcccaagatcacacaagaagtgtgtggccgcagagcctgtgtcagaacccaggccttggggtggggggacactgagtccagctgctctgaagagcatccgagcatttattcagccagccaggcgcctgtttgtttgttttcccaacacacacttattacgccccaggcaggctgctcagtgctggggacccagccatgaacaaggccagcacacgcagcccagagaagcagacagatgctaaacaagtaattacaagtgtgatggatgccacaaaggaaaagcagcaagggccctgggaagagacagtgggggatgccaacatctcccatttgtacaaggtttgcagaaaccttaccgcagtggtggtcctgcagcacctcccatcagaatcccgtttaaagcccccaggcatgcagacccagcacttctggggagggctgtttcttcccagggaaggacactgtgaggtttgaggaccacagctttagaggcctgggtgagggggtctgaaggtggtaaatgttttctaagtatccaccagatctcgggctgattcactcctgccaggccactgaggtaggcagcattaggcccattttacagagaagcaaaccaaggcctagaaaaccccagtgattagtgagtatagaagagggattcgaacccaggcctgtcagactccagatctcaggaaggtccttaaagatggcccggctcctgggtgcccagcacacaaccttgccaaatgggcttacagttaaaagggaaaccactagcactcagagaccccaggtcacggattacaaggtgccacttgtgctttacaacagagcatgttagtcacatggtgctaagtggctctgacatcacagtgggcatccagccaggtacctccactgaccaggtgcatggcctcgggcaagttgcttaacctctctgggctcagtttcctgtctgtaagatgggacaatggtggtggggaggagtttctctgcttaggcctccttgcctcccctccccctctccctccgtctgctccagtcacacccgcctcccagcctttctcaaacatgtcaggccctgtccctgctcagcagctttgcacatgctgttccttctgcctgaacactcttcctccacatagctacatatctccgctcatatgtcaccttttcagagagaccttccccgaccccttggcagaaatcacccccacaccacccctgtgtgtccaccaccctgtatccagccccgtgtccatcccccgtgtccatccccgtgtccatccccccgtgtccatccccctgtgtccatcccctgtatccatcccctgtgtccatcccctgtatccacccccctgtatccacccccctgtatccatcccccctgtgtccatccccctgtgtccatccccgtgtccatcccccctgtatccatccccctgtatccatccccactttatttttctcccccgcactgtcacagctttgacccccacctccccacgtgagaaagtaagttgcaggagggtagaggctttgttttgtcagttgtttccccagccaaggctcttgactagggccaaccagagttaacaagcatgcaagggctcaatctagccagggcttctgcattaccatggcctgtgaggcccctggcagcccattggagaggtctctaaggcatctgggaggctggttctaagtatcccgcccctagcctggtacacagcgggcatcatcagaacatgtctgaggctgtgctgacctgctgtctgagagcagacactgcccgggcttcctggaccacagcaaagacgctgaagagaggggcaatgaattcccctgggccccctccccaaatggccctgaaactagcaggcagtgggaaaccagccccaggcttggcaggggcctggcagaggctcagtgccgagggccaagggcctgccaacctcactcccccaaacagcgaccaattgtcccagcggcgcccaagttccctgaagacctcccagcagtcactctctcacagagacacccgctctcaaaggggccagcagtctggctgcttccggccacgaccacaaccaaggaggctggaccagcatggtggtcccagcttcacaggaggccccgggacttccgagccctgctgggaacttgcagccgggtgcttggtgaggagcgggtgaggacagatcccgggggtgggccagtcctcttggcatttgtatgcaggtgcagacccatgaacatgagctggaatctatcaacagaaaataaaacactcagggacagaagcctcagaagacaaactgctgcggggcgaaggtggcagccactcctgcttgctgggtgtgcaacatgtctcaggcccactctggataggcattcatccaaccctcagacagggagatgggaactgtggaacctctgtgtctcagaaaaggaaatgagggaagccatttgcccagaagagggaagccgggatttgaacccaggtctcctggcaaggccttgaccactatgctacatcctaaacctcccttgatggcgatgaggaggggctggtcaccaggagtcacgttcccatgacaaagtctcattggtgccccccagagcaatgggtctgagccctgctgcaaaccacctgtgtcagaatgggatgcaggcagcttcctagaaagcccattcagacctgctgtggctacatttttcacatgatgctactggattctgaagcgcacactggagtttaagaaccactggcttagaggcaattctgacctagacagaactagcgctttatttgtcaggacgatagacctcgagaagagctgcctatgtgggatctggaggtgacaataaaaacggctgttgattggtcactgagtatgtgctcggtcctcttttaagtgcttcattctcatttcatccttagcacaactctacagaagaagtaacagtattatcttccccattttagagatgagaaaactgaggcacagggagcttaagtctgtcctgccatcctgtgagattcatgtagttgtttggaggaggtccaccttccatctgggtgatcccagcacctgctaggtgccctgtacatgcctgcgtacatgccctgtacatgcctgcagcactgaatatgaactaggccaggtgtgttttggtggtgcgggggtcccaggacagagcttcccaaggggcaagctttgggaactctcctgacccaactgcacccccctacacacatccaccttcctgggcatacagtcctacttaccctggtgtggctgagcaaggtgctacccccttcgtcttctttgtctataagtagaactcctactatggagctattagagaaatcgggtctaaatggagccactcagacaaagcccttaggaagtggataggagaggggtcaagttttaggatgtgggtgtgaaacccacctggatccaccacttgagcgctacacagacttgcctgagcctttcatcctcacatctgcctagtgaggatcagaattgtatgtaatcacgtgaaggtgaaatatgcaaactacctgtgcacagtgggcctcactgtacggtcgccggtgaaaagtactaagattggtgccacaaccccatcagcacaacacccctgacccctccttccagggctcgagctagggggttgtcagtgcctggctggtgctcaggcctcttcagctggagcctggagctgaaggcctgtttgctgggttacaggaagatctgagctgtacagctggtgctggcgaggaaaggtatttgcatcagataataggtaaagtgtcttgttattccattaacttgtgtagcaacgactgcggcagagggagggagcgttggaaagccgtagggtgggcaggggatgagctcactgacccacagctaagccagggacttccagggggcccagcagcctcaacaggagctacaggggtagcctttgggcagaggggtatgggtgaggctgcccctcgttccagaaccctaaccttaaggtagggccccagctgggggcaaaatcgaaaagtacatcccaggcaccaccagcaccagtgcctccccctcccccacccctaattgacctctgagtccctggggctcaggggctctgaccatgaccacagcatgcagcctcctgaacaaaagcatagatgctggagccccctggatgggggtttgaatcccgactccacccttcacaagtttggtaagttgcacaggcacctagcattgctgggcttcctattaaatgggatactactattacactcatccctcgaggccatgtcatccctcctctgacaaatcccatggagtccctgccacgtgctggtgccttctaggcactgggaaccagcagggaacaacagggactaagtcttgttctgacgaaatttgcattccaggtgggggagggtgcacataaataaataagagaaatatgagaaagtgataagtgctataaaacttggaaatgggataacaaggggccagatgtaaggaggagcggtcttttagagaatgaaggaaggatactctggggggaggcatttgaactaaggcgcaggtgacatcaacagccttgaagggccccaggttggcctcaagggacacgtttgaggagaggaaggaggccagtgtggctgaagcagagtgggcagcaaagatggacaacctcaggatggagaagagtggggactggccacgtagagcagcatggctgcaggattcattttgactggaagcaccatggcagtccctggaggttcagagcaggggagggatgtgatctgattttgatggttcaaaggcctcctggctgctggtaggggatggattgcagaggccagggtggtgcaggggagctgaaaagaggctggtacagccatgggcatgacagcagctgtggtctaagaaggtagtgcaggggaatgtgggacgagacagtggaccagggctgggctgggttttaaagatactgtcacaggatctgaggatgatgagcaggagagggaaagggaagggacaaggatggcacaggtgattgagaccatgtatgttagcagagggtttattgagcgtggccccttgcatacagtaagtgctggtaaacactgcccattgggaaagcatagtgttctacactaagcaccaccttctacaggaaccagccctgttgatcaacagagcggcatttctggtctcagattcctggattgcaccaaatgacctctgaggggataacagaggactccacgcaggaagggttcaggcagtcatgttgcccaacatgtgcggtgacagcataaacaccagggtgacttgtcccaggtcactgggcttgttaggggcagagtgggatctcttgaccctgtaaaatgtcctctgggatctaaagtctgagattcccaggtgtgagtccttctctggacctcgggcttcggtagcagagtccagcctcagagcctttgtgcttgctgttccccttcctggagcctcccatgacctttggatgtcacttggcctctctgcgccctctcaccccagcagttctgcagaggtcagcctttagaactgacccacgcctccctgggcctgcagggtttcacagagctcggcagcagcttgggttacccctagggtcaggtcatcaccatttgcctcatctccttccacagccaacttggaaggattccccagccttgtgccaggagaggctggcacggctgccagagccccactccgtggcgccataggccctcacagggactgccctggctcctggtggccaaaccacacaggatagaaccacctttcctgctgggacacagcccaggcggaatccccctttctttctcctggaccaatcagatgtgagtcagggaccctctcattaacaaatttcctcccttcctcctcccctgttatgaggccaggagcgggcgtcgacctacatggaaggggaggagaggtggaaccagttggagcaaatacccaacctgcctcttgcctggtaaggtcacccagaagccttgagccagcagccgttccttcctccatctccaacggtctggccttatgctagcccccaactcaggacacagactttacacttaaccccaaagcagtccctgcctcacttggggccaagttcagacaagaggcaatcagggacttaactggctgccagagaaggccacccgcctggttattaaatattaagtggcaagagcctgagaatgtataattgcaaatgagactctgaggcagatgttgccaacagcttggaccggtgcatgcagttgggaccaacaggggatttcaagtcaccaagccaggctgctggcaagggccccacatttgctgggcacctgctgggtaccaggccctgaactggatgctacgtgtaaaaagattaaccagacacgactccagcttcaagaggttccctgtccgctgaagaagtaagcaagggctcacaaccacaggtaatctcgggcgtggtgcgggccccagggaaatatctagaaggggttggagaattgaggcttcagagtggaaatgagctgactttgaactgtacattcagtcagtcatttaacaaacattggttcaatacctaatgtgtgccaaatgttgtagattcagggaaataaagtattaaataaaccaaactctctcatggtgcttacaattgagtgagagcttgtattccaaggatgaacaaggtttgcaccaagaagaagagataaagaagagagcgagcctgtgcaaacattcagaggcatgaagtcaagtagcttcaaggtgaatagggagttcactgcggctggacatgtgtgaaagggagggagtgaggcagggagcaagggagggagggagggagggatgggatggctagtagccagagcctgaaaagctgccacattaaagagtataggtgagtcctggagggtttcaaagtacagtgcaatgccctccctcagggatagtccatggctcccaggattcctgagataggacacagtctactctcttttttttttttttttttttttgagatgaagtctcgctcttgtcccccaggctggagtgcaatagcgtgatcttggctcactgcaacctctgcctcccgggttcaagcgattctcctgcctcagcctcctgattagctgggattataggattacaggtatgcgccaccaagcccagctaatttttgtatttttagtagagacagggtttcaccatgttggccaggctggtcttgaactcctgacctcaggtgatccacccacttgggcctcccaaagtgctgggattacaggcgtgagccaccgtgcccgaccggatatagtctactcttttaagcagtaagaggaagcaataagaggaagaagacaccccactgaatatcctggggcatgagtgtggttgcctggttagctacccacccccaccccaggctaggttactgagactccaccgagggaggatctcagagaaacagagccctgcccctttactctccccacacctgcagcctgtgtcagctcctgaactgctaagaacatatcctaggaacataggtgcctttgtcttcgccaggaactcagtccctgtggcaggtggcggtggggagagtaatatgagaccccagacccttcaggcaacaagtccttgtccagcaagagagccagggaagattccagtgcaacacttccaagaatgtcctcactggctggacctctgtctccactgccctgcccggagccagggtggggtggactggatgaactttcaaggtcattttctggccatgattctatacaaagagaagggggacaagaagaactgcatgtgcatgtgaagatgctaaaatcccaggaggattagggtccttgaagaggttctacgcgtctagagttgcattcggctgagattctagaattctatagttcgacaattccaagattttagaatcctgtgattctaagactcttacttgattaggggaaggaagacatcgtagtcatcacatccccttaataaaattcacgcctctgggaagaaccccacacccgtaactccaaagccaagcaggcttgttttccccctttctgcctttaaattgtcttttcactctttggtgtctgctcatctgcacacccccctccacagtccctcctccaagcctggcagccacacatttgccatctacatataacccagtgattagcacagcagaacagagaggagggtgtggaagccatgctgcctgccagtcggacggccttaagtcgaccaggctgcagcgaatcacctcagctccctgaaagggctgagcagggaagggaaacgcactcctgcagattcagacacacacacagagacacacaaaggagggccccaggcacacagacacacaaagaaacagagatgtgcacgcacacacagacagtgcaaacagcacacgcccacatgcgtacagcactcacacacatgcaaacaaaccagagacagacacacaaccccacagtgacatacacctggacacgcaggcatgcagaaaaacagagaaagacatgcacagcacacgtggatatttgcggtgcaacatagacatacacacacactcatatatagccacacagcaaaacacacaatgcatgcatacacactcaaatgtacaaacccatgcaaataaatccaaacgaatagatacggatccagagttacacagatcaacacactcccagggggacaacagcactcagctgttaacatacctccaaatgagagttgtcagaatcccccttctcatccccatctcccactccctctcattcatgggacattatttaggcccactctgcacacaacctggcactgggcccctgggagatcccagggctctgacacagtggagtaaggggaggagcagttcagtcagcccccgggaactcagaggcagctagaatacagataggcactgggttcaggaaaccattcccagagctgtacaaaatggattgcctggaaaggtagtgagctccccacccctggaggcaatctagtgcaaccaagggttttgggcatcagatgggagagtgggtgccaggggaattgaaggcctttaaaatctattccagccctgagagtctatttctatcaattccactgggcttcaaaacagtggtcttcaaaattttttgtatcatattccctatcagtaaaaacatttaaaacatgtattcctcaatgtatgtacatttgatactttttacaaatttttgtatatttctttgttatgtacttcatagaacacatacacaaaatagaaaaatttgaaaaatgagataaaggtacatagatcactactttaaaggacaggtgaaactgaagggaaagtgatataacatttatgaagtccctcctgtgtgccagacttttgatatatattatgcctttgaatcttcaaatagctctgtaaagaagctgtcatgagttttccattttgcagatgagaaactaaatggcaagacaaataaaatcatttccccacagtcttgccacctgtagctgccacggctggaatctggacccaagtaagctggctccggagcccactgcccaccctgaccactcctatgtcatacaggaagcatggagctggggaaagacccatttggtttttgggggcaacaggctgagtggaggggctgcacgatttgtcaagagccctgaatgacggccttgaagccaagcagcaggtatgattctcaaaccacaggcacagttgggccagatgtggccatttctttcctttaaatcttcactgctcagagtgcagtccagggaccagcagcttcaacctcacctggaagtttatcagaaatgcagaatcttggccccgctacaaacctactaagtcagaatctgcatttagcaagaataaagtttgagaagcctcaaattacttaaactcatctggtctgtgaatgtatcccatgggggtgacgtgaagcaagcccaaccttggtcattcttggggctctctcctctccagagcctgctcagatgcagggtcttagagagtctctggacatttgaggtggcttccaggaatctgtccacactgcttgcctgcagctcctcggctcctaatcccgcagtggctcccatctggttctgagtaaaagctgaaggcctcaccttggcctgcacggcccaacagactggaccctgcttcctctctaacctcatctcccgcctcactcctggctagtttcccgttgcctggctgcccagctgcccttgaacttgtcatcccagggtcttcccggggtctttgcactggccattcctttcacctggtgttcctatggctctccttcatactttccttaggaaactccactccctgagtgagacctccactgcatagaatagcatcccctcccccctaattcatacatttatctttccatctcctccactagaatgtgaatgccttgagtgcaggaactgtgactatctcatttccagcatccagctgagcccctggccatagtagatgctcaataaatatctgttggctgatggaggccgtgcccattgtcccaccctaagggacacccatctcagtcaccctgtggggctgtggggtcttccatgagggcagaggtcttgagacacagttatggctacctggagccaccgtgaggcctgccctggaggccttgtcccctccccaatcctgctggcgtgggggcagcaccccctgtcagcctgaccccctccagcttctccagtgtgcttgcccccaatctctcccagtctttcctgggaatctctttggttttagactttactaaagactaaggggagttcatttttctgcctaaatccctgcagtgcctgtttactaagcccaactatttgcttgaagctgaagagaagaaacataaagaggaaaaacagactaacattttctaacttggcctgtcatgcctacaggccgtgagagctcaggccacccatttccctttctgcgcctcagtctcctcatctattcccagagattcatggggatagttaccaccttttttgctgaagagggaatgagacacagtgagaaagaaaactataatggtggaatttcaagtatgaaccagccagggttgtaggcgttggggcagcagggtgtgagttgggagtaaggagggggactaagggatttgctatcaaaagatctgggtttatggcctttctgtgccactaagtcaatatgttggtcaggtagagcctctgtttactcatctgtacaataggtatggcacggctatgaggctcccatcagatacagtccaaagggctctgggagacttcccaatccacttccctccttgctccagcagcagtggcagcatgaaggctggtgtggccaactgctacccagagggcatggtcccaatcggaagctgcagcagcaaagacagtggtatgtgttgtttaggctttccctgagagccaaaccagttcctgcccagggatggacacttcctttctcgggtacaggaatgaggccaactagagtcttggcttccctgcccaggaaagcagccgggggagtccaacgaggacacctgttccttcaggaaacccaagccaagccaggccctcgggtggcggagcctgagcccctggatccagctgccagtgccctcatggacagagctgcatcctgcttcctgtttcctgcttcctgctccttctttcactctatcagtagtttctgcctgaggccctactctgtgtgggctcagctccaggtgctagggaacaaaggcaaagagctcacatggagctcaaagatcagtaggagagccacgcaaccaatcaaatgtataacattgatatgctgtcaagaaatggaaatgctatcaaaaaataaagtggagtagggaataggaagtgatgggacagttttagctgagtggtcaggacatgcttctctgcagaggtgatatttgagcatagaccctaaggaagagtcaggggcaaactaggcagctagctggggaagagggttcttggcacagggaacagcccgtgcaaaggccctgaggtaggcacctgctgggcatgttcaaggaatactgagatggtgaattaactggagtggagtgagcaagggggagagtgtggggagaccgggtcagtgaagcaggggatcacagggggccttttgagctgcactgagaacttcaggttttactccaagagaaggagtggaaggccattgggaggcttttattgaagaagcaacaaggtggggagtccaggaagtacggagccagtgaggaagtgactgcactaatccaggtgagaaatgaaggtactgggaccggagtgtgatgcaggtgggaaggagtggttggattctgggtttattttgaaggtagagccaagaggattggctggcagggaaggaagagaaagagataagtcaaggagggcaccaaggtattttgcctgaggaactgcacgaacagactgagatggagcaggcaacaaacatcattctcagctgccatgcgttggtgcatattttctctgtctctctctctcgtctctgtctctcgctctcctctttatgcattaatcctgccctcacctattttcagatgagaaaactgaggctgagacccactcgagatcacacacatagtgaggggcagcgcctggaattgcatgcatatctcttagccactgagctacactgtcccatcagaactggagttagggtcatctgttcattccttatttcatccaccagatccttgtgtgtctaagaccttttagcaggtctggtgctgggcacctgagaaggacgtggaaaccatcaggacctggaaatcatcaagccaacacctcagtagtgatggaaacccagagagggcactgtggggcatcccaagctcatcctaagcaagtagaagtcagaatgtgcagaggtcgggagcaggggatagggaatgagagctcctggattcaaagcctggctctggagctctcaaggtgtgggctcttggacaagctccttaagttctctgtgcctcagttttctcatctgtgaaatggggataagaattgtgtccacgtaagataatcacagggaggcatcatgagataatgtgctgaaacccttcaggcctggggcttaacacacactcctatgtttacctgtgattagtactattaggcagtcagcactcaaacccaggtctctccgtgatggctgaggcaatcagctctctgcccctgcaacaccaccagtacacccacccagaggtgttggggagggctcagctctgggtggagctagatccccagagcctgagaacagtgtttagggcccgacagtgtggtcccaccccttatgggctcctatgagctgcctgcctgcctgccgagttgctcaatcactgacttccccaggaaagcactaattacagcaaagctcccctgggttcagtgatctgtcacagcccctaggcatcagagcactggctacagtctctacagcaagcgctgtcctgccctctgccttcgccctaaggggaggacagaaaccacagggatggacagactaaccaacacggaaactggggccaggcttacaaaggagtctcaccttggcttgaatggcagtctattcagcggttctcaaagtgtgatccctgaatcagtagcgtcagtatcacctgggaccttgttagaaatgcagattttcagaccttacctaaggcctactgaatcagacactccatggctagggccctggaatcagtgttttaacaatccctccaggggctattggtatcagctcacgttgtagaaccaaagctctgatgcctgtgcagctgtggttggatggaggcctgtggagaggcgattatgaagtgggatggattgaagcacaggttcatagagacccaccttcaaatccaggctgtgccaattccttaccctgagattggatcgtgggcagagagcttcatttatttattatttttacttactattattttagagataggttctcactctgttgcccaggctggagtgcagtggagcaatcataggtcactgcagcctggaactcctgggctcaagcaatcctcccacctctgcctcccaaagtgctgggattacaggtgtaagccaccatgcccagcccagtttttaaatttaatacatatttattgacaacctattgtttactgttaaagaccctggagctacagctctgggacaaaacaatggcagcggccaacacttaaccgatattaactcatttaaccctcacaagaaacctttcaggtaaggtcctatcattaccccgaaggaagcacagatcatcaaaataacttgccccacggggctagtctgagagaccgctggagtgcaagccactaggataaactgacctggagctagttagggagacagacaaaatgcagtggagacacacaatattagcaggtcgtgatgcatgctatgaagataaaatagggaagagggtagggcatattgggcaggcgtgagggtgactactttaacagggtggtctggcaaggcctctcaaggaggtggcgtgtgagcagaggcctcctgaagtctcagctgcctcatctgtagaatgagggaatgattagctcacccccccaggtgtggtatgaatgtcacaagtctgtaaagcatagtagctgctgaacagatgggaattgttactgtttggaaaactgagttcaaatcctgactggtctggccacccagacaaagggcctgttgtgaaccttggagattacccttactctgtaagggccggaggacatagcaggggctcggtaaggtcactcccatctcccatccccccaaccccacttgccttccagcctggtgagcagcaactcttggggcagttggttccctggtccaggctgcccaggagtccgtgctgtttttatttttattgttctggcttcacagctgagacctctaactccaaatggctcttcttgcccagaaaaataggtcgttggcagctccagcctcctggcaggcctgcctgctgacgccagcccagggttacgggaagtggggagcagagcgcgggcagggctggaaccaggtgaagctgggctgtgcaggtgccagcgtgccccacagggtggccctggtcaagtcgtgttctgtctctcagtgtgtttcctcacctctgggaacaccgcggagttgctgaggcttcagtgagataatgtatctcaaaggacctagaacacacaagggtgtcatctacccccctgcaaaggccaaactccagataggccctgccatgccatcgtggctgctttcacatccttgtcactactgacccctcgtatcagagtttgttatccctatttcacagatgaaaagactgaggctcaatttttttttttgcccaagttgcataagtcaaattggcaaaatcttggcttccaagcccctgatcctctccttctcatgcccatttgtcttcttcccttgacaacagggaaggaatgtgatctgacttctgtgcaaggattcctcgggctggtgagtgaggaatcgacagaaggcacaaggtggaaatagggcgcccaggtgagagcggtggaggctcagacgagggcggaagcagcggaggcgctgagaagtggtttggccctggttgtgatgagaaggcccagcaggcaggatttgctgacagattgtgccctctaggagtaagaggaagagtcaagcagcaaaagcagggatgcaaccacccctggcttcccatctcacctcctcggtgagaccttccttgatccgttttcaaaattgcaatctatccctctcatcagcactcctgggcctcttccctggctaattccccccaccccgtagcacctgtcccatttgacaaactaaataatttacttatcttatcggttcgtttcctcccactagaatgtcagcttcttgagggcagagatttttatctgttttccagctgttgcattcccagtgcctggcacctagcagatgcttaatactgttgagtgcgtgagtgaacatgtgtgaaggcagttagattttaacgcagggcagcacagacctcctgctgtgcgggtggctgattcatgtcaattatctgccataatctctctgtgtggcctcagacaagttgcccctcacatcagtctacccatggcccgtgggtctcaatggcttctcagccttgaggttggccaaggatgatttttatgtggacagagaacaagggtcagggccccctccagggggagaggtgagggaagccctgctgagcgcctttgccaaaggtgctatatataaatagcaggtggttcaattattatccttccctaatctccagtttcctaatcccccagcaggtttgtgagtgtgtatgtgtcttgaggaacagtgaacagcagagccttctggaagtccagggcaggaggctgcctcttctctgacttcatcagcagcccccatctccactcccaccccagatggagtctggtgacagattttcccaggagcctccctggttaccttcatggtctagacccgatgtggcctgaagagttggagaccttccctgcacccacctcagataccaggataaccccagaacaatctttctcattggtgcccaattccacgctcctctctctccagtccaccctccgcttgcagactggccttttagacacataaatcagacatggccctcccgtgctgaaaaccctctaggggtctcccaactgcagaataaacgcaggctctttacccaggtcttggagaccatcccaccctccccagtcctgcatactgcgctttctctcctccggcctagccacctggggccttcccctccttgtgctgggccctcttcctggaacacctttctccccaaatcttcgccttgctgaccctacttgtgattcagcaacccatgtctcagggaggtcttactggcccccttatctaaatacgctcacccctctccttctctaagttcaatcttccgttcttcattaattatttctacttgtccacttacctgtctcccctagtagaatataaattcctcatggacagggacctcgtgctctcccacacccagagaaatgaaaattcccttgcacttcaaatgctgcccagaaccctgtgggttctcaaggactgttgtcaaacacttcacttatttatcaaatgcttatgttgcacttggtatgtgctaggctctttttaacatgtcttacaaatattaactcatcaaatcctcacaattgagactcacgctggcctcgtctcagatgaagaagctgaggcacagaagaggtaaggcactttccagtccacccagctcataacagtagccgggggatttgaacccacggagttcagcccatgttctcaagtgtggcaccttccctgcccccctgcacaacagcagggccatgccttcaccaggaggctcggggcaggaggggaggcagtggtgttactttgcacaggtctttaacctgggaatcaggaattcaaatcttgtttctaccccaagctttgctgtgtggccttaagcaaacctattccctctccgggcctcaactttctgtccatttacagggttgggccttctctcaccttgtgtcattcctgtcctcttaaccgccactgtgtgaaccaaaattctctcccattagcagcggggtcttgaacttgtgttcctcccacagtgcggagccttctgccaggtgaccacgacactggcactccccatcactgacctggctactacaggaacggcgttccctccgggaaaaccggggttctgtcctctccaactccaggcctctggccccggctccccttcccctcatcttcctcagggcttgtccttctcccggaacccaggccttcagggccccgctctcccacacacgccccggcctgggcctcccacccgcccagtccgccctccaccaccgagacacctggccagggggcctccacctccctgggaaggccccgacccttcccctctggttgcgcgccacagcccccttctcgctccctctcctccccgcgcctcttttccaggcggcaccgaagtccttcctacacacacgctatttttgtaccatcatctcttcttcctctccccttccccctgcgttcacttacttccttcttttccttcacctcggcccggctctgaaaggatcgggcccctccggcccgcacccacccccaagaggggccttcagctttggggctcagaggcacgacctcctggggagggttaaaaggcagacgcccccccgccccccgcgcccccgcgccccgactccttcgccgcctccagcctctcgccagtgggaagcggggagcagccgcgcggccggagtccggaggcgaggggaggtcggccgcaacttccccggtccaccttaagaggacgatgtagccagctcgcagcgctgaccttagaaaaacaagtttgcgcaaagtggagcggggacccggcctctgggcagccccggcggcgcttccagtgccttccagccctcgcgggcggcgcaggtccgggcccggcagggacggggaggggcagagcgggaccggtcggggctggggaccagccgcgcgggcttctgaacgggcacgctgtcggagccggaggctcgtctagtcccgagccccagcgggccgcggcggctcgcggggccgccttcccgggacagcagccggggcccgggcgccggcgcgggggaggacgctgccctccccggccgggcgcgcagctcgcagccctcgctccctcccccggggcgcgcaggcgggcgctcgctcgcagagaaggtgccggcggggccggagccccgaagcctccccgggcggcgggaagacgggaggaggggaaagggaaggagggagggggtcgggctgccgggagggcgggggcagcggccgggactgcgggccgggagcgagcccagccgcccgcgccgtgtggagcccgggcggggcaggtgggcagcggcgggggcggctccgcgcggccgggctcggccgtgctgcccctcgcccctgctcgcgcggtcctctctcccgcgcggtctgtcggtctgcgcgccgcctcgctcctcgctcctcgctctccccctctttctccccctctcgcctctccgtgtctctggctctctgcctggctcccttgggtctgtttctctctcctgccgcctctctctggccgcccctggctttatttctcgcgcgcttggggtctctcccagtctccgtctctccatttctcctggggggcggggagggggggtctccaaaaaccgcggcggcggcggcggccgctccaggcgcccgttccggagtcggggggaggcccagccgggaggggggaagggggggagccttagtcatttccccgctccagcctgctcccgcccgagcgcgcactcacggccgctctccctcctcgctccgcagccgcggcccatggagcccgccggcccggcccccggccgcctcgggccgctgctctgcctgctgctcgccgcgtcctgcgcctggtcaggtaagcacccccccgctccccaccgctgcactccccaaactgcgggctcaggcctctcagactggcactgggaccccttcggctaatgccgagcagtaatagggggagagacgcctgtaaccagggttatagatgcagaaactgaggcccagagagggccagcgacatgcccaaggtcacacagccaagggtagaacccaagtctcttctatgagagtttgtctctgtggactctgactctgtgcactgtgctgggcactgagacaaaagagccgagttgcttcactcagcccctgcccggtccaatggggaaggctgactgacagtggctttcagagcagggccgtccggcttccccagaatctgtccccatggacatacgactttccacatgtttgacttcagggtgtgaggggaggaggtgagggcagaggtcctcccgatgctgcctggaatggaacagagacaagctgttgcaattagggaagagtgagccctccctctggtgcgcagagtaaaccggtgttagtgtgtgcctgggagagagggagccgggaggccgcggtaaccccagagcgagctgctgcgagcaacagatccttatgtaaaaacacggtggattgtccctgtggttgccaaagcctctccctggtggtcttgctccttgaggcgctcccagctcccccttcctcctgccttccccgagcttccaggcagctccctgcagttcaggtgctccgcggggatgttacctgtggctctgaccatgtctttctgttggcctacatcaaacacctggctgtcgccggcaggcgggctctgaaggctactgtgcatgttcaccaaagggtgaggtcaccattcaggagtcttgcttcttaaatgggttttgcaaaaccatgggtctcctgggagggcaccgggtggggggcggggggagcagagaaatggcattaagggagttgggagggagagaaaaatggggatcttgttttttgtcgtcttgaaactgtgttgtaggcagtggggtctctctgtacctcccacccttgaggagggaggtaaagatgagctcagtgtccaacacccccttttgcgtttgactagagatggtaaccatctgatagcagggagaaagggagaactagcaaagagtgggtggaaggagaagtatggggggtagacagctgcttctctctgccctgcagtttcccctgaaacccaggaattcacataggcatccccccaccccaccccaccctccacccccagttcttttcagttatagttgcgtccttgctgggctgaagggagcactgatacagttcacgtctctccagtgagtggcatctcctatctgctccttcctgcctgagctggccatttgtaccctgcaaaagtccgagttcctgccctgccatccttcctggcctggaaatgcacaagtgtcactcacaagtgcttaattttcctgaagcagggaattgggcccgagttaatttctaaatgtctattccagacccttctccgaccaggaggctgtggttcagtccctggcaaacgagcagtgacgctgattagcaagtgctccgatgggcagcctgcctttcctggggcaccggctgggaacaccaacacctttcttgtgagcacatctcccccttttgcctataaaaacagtctataagatggtaaagattgggccataaaacttccgttccaatccattcagcatcaatagcctgaaaaagtgggagcagcagaggggccaagattagctttgaaataaataaatcttaggaggtaagaatgaatttcttggtcgagggtggtggggaagggatgaggtgcgaccatcatagctcaagtctcccattatccttcagtatctgttcttcggggtcctggtcacaccatgggcctgggcagggaagtcacctggtttggctgaaggatggggcctcaggcccctccccctattgctccagacatggaatttacaacaaagaagtagagagacaggatatgagggtaggaaggtacaaggaggcagttgtccaattttctaagaaaatggatttgttcgagtgagaaactaaaatgtcaggtttaggaaggcggctttggattgaatgactactagtgtctcaggcagaactgtcagcctgggaggtgtcacatgattcctgtgtcttcacatgatcactgttttgggggggtggggccaatcatgtgaattatcctgggtgggggaggcaagagaagaagtttctaaagattgcttttagcacaaatgctgccaaagggaaattctaaaaagatcccagtgaagtcaccaacctatgtttttggacccaatgtgaggcctgtttcctaaaacaactgcactgagggagattctgaggctgggagaagggcaagggactgaggcctggggacacctggcacctgattttgtgtcagcagggcctgacgctgaacccgcaggatgcctgcttggccccaggtaggccttgagacctctgagtcaccccccaggccgacctcagataaactcccattcatttcttctctctggcctggaggaggccaagccaagttgcagttcaggctctggggagcagcggggccccccagtgaacctctcaccgtttggtagagggtggcactctgggggctcctctgtactttcctaaatggtaaagttaatctcacttcctctttcgtaagaagagaaaacggggcgggagtgctttggctcaacacatcaggctgttggaagttcctttaaagccatagttttctctgagtactttctggcctttaccaacccctcggaaactcacggtaattcacgtctgtacttgcagtcatgcagcacctatgcagtgctggtgtgaaccatgtgttgagagaagggaggaaaaccaacattcattagatagttaatggcgttccaggccggatgctgctcctgcgtcgtctcacccgcaagacatggattggctcttctccccattctgcagatgcagaaaatcgagtcccaaactggggaactaacttataagtgatagagaggagccaggattttggatgctggccttcctgctgggtggcttctagggaagaagctcaatgacttaatcaggatgatttagtccaagctggagagggagtgagagaggcccctttctggccttgggtggaggactgtagaagagttctttctctgggcagaaggttttgatgaagtcacaggcatttctctgaaagcctgctgagggtggaaatactgacagccccttggtcctcaccagtaacaacacatgagaggtgatgtggctcctgtgagagccccccatctgggctgctgagctctggagcccccagagctggaatattcctccctgcatcttcctggtgccctttgcgacagatggagagggggtgtgcgagaggaagggagtctaaaagtgttgtacggatcccacacgcgctcgcttgctgcttccaatggctccgtgcgacaggttattttcttatttgtagtcttggactgacggaaggtttcccccctctctctctctttttaaatgtgctcagatttctggcctgtcaacacaactcagatcatgtcactccccagctcaaaactgttgagtgggtccaagttttctttaaaaaaaaaaaacaaaaaaacacaaagctgccgtgaggcctgggcttcctccctgccaggcctgatttccagccacatgttttccaacaagctgacctgttgagatgctgcaggataaccaggcttcctccctgcagaccagagctttgctggctactcagccacacgagcaccccaaagaccctgagaagccctgcaatgtagaatcccgagctgggtcacatttactccagtgttccctgaacttatgaacgagaggcatttgatttgtagtatgcccgttagcatgtggcctctctccgtttggtaaacggttttctacagatccatgccctcagctgaactctcagctctgtgccttggcccgtgctgttcctgccatcagaaatgccctccctgtacctccttgtcttcctgtgtctgaatcctactcatcctccgaggttcaatttaatgtgcctcctggggagaggtcagaggagcctctccacgcagacacacaccctggcctagcgctaagatggtgctaagacccctgggtgttgatctgagccctgctactgacttggacaatttgcaggaatctgtgtctcattttgctcatctgtaaaagaggaatggtattaaccactctattgcaaggattaagttaattaatgcgtgtataatgctggaagccatgccttgtatgtagtaagcactcaatacatattaaccagtgttgtaattagcatggctttattctggtttgattcctcttttttaacaattgggacggattttcataaaacatctaacacagttgcttacacatagggggtacttaaaaaacagcaaaggctgttcagtgaacaaatgtccttcagcttgatattttccttgtagctttttttttttcttttttttttttttgagatggagtttcactcttgttgcccaggctggagtgcaatggcgtgatctcggctcaacgcaacctccgcctcctgggttcaagcgattctcctgcctcagcctcccgagtagctgggattacagggatgcgccaccatgcctggctgattttgtatttttagtagagacaaggtttctccgtgttggtcaggctggtctcgaactcctgaccccaggtgatccacctcccaaagtgctgggattacaggctgagccaccgcaccacccagctgtccttgtagcttttatgctgttgggggatggacaagttgagtagaaacccaggctagagtgatttaattgcctgttactagggactgagtgctgtgggcacagcctgcctctaggtgtctctatctggatccacaggtctgcagttgtggattcccggacctgcaaagcagtagggggcctgagagagccctctgtgctttcatccagtgccttatggtgcggccagaagaacagagagaaaaaaactggccgggcccacgcgggagatccatggcaaggcccggctggaacgccaagcctcctgtggtccaggccaaggcttttaaaaactgggctgtgctggaactttccactgtttcagccagaaatctgacaggatcccgaattccccgggaaaacactaaagtaatactaataggaaccatctgggttctctgcttcctgggctcagcacttggtgtgtgtgaccctggtggtactcacagccacctggcgatgcacgtcgttatcttcggacccgttggatctgtgaggaaactgaggctctgaatggtgaagcagcttgcccaaggccacaccgtaagcgccagatgtggataaccactgtcggcctaatcacagagcctatgtggttaactgttgtgccattccttagccgtcactgaggcttgcttgacaggtagggaaactgaggcccagttgtgctggcaccctgctcccttagtgctcctctcatttttgtttttgttttttcttcctttctttctttctttttttttttttttttttttttttgagacggagtcttgctctgtcgcccaggctggagtgcagtggtgcgacctcggctcactgcagcctctgcctcctgggtccaagcaattctcctatctcagcctccccagtagctaggactacaggcgcacaccgtcacgcccagctaatttttgtgtttttagtagagactgggtttcaccatattgatcaggctggtctcaaactcctgacctcaggtgatcctcccgcctcggcctcccaaagtgctgggattacaggcgtgagccactgcacccggcctcctctcgtatttctatcagtgcaccttcctatgaggtgggggcagtgtgtgtccccaaggtgtgtccctgtccccatactagagaaggaagcatctattttcacagctgaaactgctttcctgttaactgctggtgttcctgggatgggtattctgatgaagccctccacgagatggattttccctgccaggtgtcttgccaggccctcagtccagagagatgcaaaacagctgaggtggaagtcggaaatgctgcagaattggttctttgtgtctgtaagatttcctggcacattcgttcgggggcgcagggtgttagatggctgcagattagcgccaagagcccaaggagatcaggtgctcggatcaggagggaaattggaagccgggagtgagcgatgggcctcccagccaggagggacggctggagcaggtgggcggtgataccagcgccgtttctacagctccattcttcaggccgaccgtcggtgttctccagaaatggaagcccgtggtggaaggaaatactaggtacacgatgtgctcggcacaggctgagccttgaacatgtgttagctcttccttatctttttattttggaaaatttcaaacatatgcaaaatgagaaggaatgatgtaatgagcctcagctttgacactgatcaactctataccatgcttgtcccctgcccctatttttgctagggagaggagaatcggggagtatataaagcaagtgctaaacatggggtatcatttcacccaccgatactctctccacatcccttcatgtgagctgttacctgaccctcaccacgagccaaacagtatggcccttcatccccactttacagataaggcaactgaggcttcccaaggccaagtggggctcatccttaggccacacagccagtgagaggtaaagccaggctccactcctcactttacccttaaccactttgcagtcattattagggtcattttaattgtaaatattcattcaacaaatatttttgagcacctactatgtgccagggatggctctaggtgcttggaggatacaaatgtgaacaagacagacaaaaacacctgctctcgtgcagcagacattctagtgaggaagagaaaaacacacccaagtaaacaaatgatgccaggtagctggggagaaaagcaggaggagggaagggagaaggttagtcaggacagagggagggccgctctaaggagcagaggcctcaagaaaatgtacaattaaggccaggtgcggtggctcacgcctataatcccagcactttgggaggctgaggtgggcagatcacctgaggtcaggagtttgagaccagcctggccaacatggcgaaatcccatctccactaaaaatacaaaaattagccgggcatggtggcgtgcgcctggaatcccagctactctggaggctgcggcaggagaatcgcttgaccccaggaggcagaggttgcagtgagccgagattgcaccactgcactcccgcctgggtgacagagcaagactctgtctcaaaaaaaaaaaaaaaaaaaaagaaaagaaagaaaagaaaatggaggagtagccacgggggatagcaagagccctccatgtgggaggaatggcagatgcaaaggccctgaggcaggaatgagcttgtatgttccaggaattgcaaagaggccagtggggctggagtgaaagtagaagaggtgggggagtgagcagaggtcagggccagaccagcaggatctggctcattgagcacctaacatggagcatgtctggcttgtgagaggatcattatgcattctctcatttaattctcaccacgggttctgtaagatgggaaataccgttaatccattggacagatgaagaaactgagactcagaaaggtaaagtgacttgcctaaggtcacacagcttttatgtgcagaactaggatttaggtccctgaatgctgcagcatccccattgctgctttccgcagccgtccttgcccccttcgggctcttcacccatagcagctggagtgaatcaagtcatctttggttctgctggaaacctttttcggtttccagcatggcatttctggaccacgtctgtctcttcatcctcacctcttaccactctcctgcctccttgggcttcagccttggcagcgtcctttctggcccttcaccagcttctttcccacccgagggcctttgcactggctgtctcttctacgggagcatcttccctggtcttcacttcctttgggtctcagctgccacctcccttccttggatgctgtcccaaccaccccattccaaaagaggttatcgcttgtgattctctatcactgggccaaatctgcctgttgcctagtgctcctagccctttctatattaattcatttcattatttcagccctgtctcctccactaggatataagctgcacgagagatgggctatgtctcttactcactgttgggcctcccaggacctcagcacagggcctgacacacagtaggtgggttaatagatactgattgaatgaaagaacaaggtgggtactaaaatcccccttttaaagaggaggcttggagttatgaggttgtacgagcaaagcttattccctaactaccacagtcccccccctgcagccagggccgggatcataccacaattccctgcccatcaagctgtcatgaatagccctaagatatcaggaagcacaaagatatcaatgccaggagggataggaggaggcggccaagaaaccccggaatttgtacttaaaattctggctacgcaaactgcttgcccaactttagacaccatgatgaatgatcaggtgctgcaaccatgaaacatgacgtaattagtgctgcactcttggctgggggttggcttggaggccccacctcgaggttagcctcccccagagggtcactgcacgaggcagtctggtgcggggtgggggttacaacagagggaggtggaatcagaccactcggcagccctgtgaccatggccaaatggttgtacctcccaaagcttcacatctggtcctccgtgaaatgggggtggcgacagccctgtcttactgggctcctgcagaggttccatgaggcctgtcttgctctgggcagcgtcgatgcttattagctattgttactgctgttatgtgattgtcatcgttttatggtttgggaattttaaaagctccatcttttgccagcggggagacctggaacccactcctctgccccctcagcctcagtttccccttctgtgaccgggaggcttggctcggctcctctcttgcaggtcccttccagccctgatgctccagcctgcatgtcctcctggccctttgtcctgatgactccacagactcctctgggaggagaggccatggaggggcttctgctctggggcacattcctgaattggagtccagcatgtgccgcttactggctgtgtgctctggggcaggtgtcttcccagctctgagcctccgtttccccatctgcaaaatggaaccgctaacactgtttcctcccaaatgggtgactgttgagggttaaggaattaagagccgtggaaagtgcttttgcaagctgcaaaatgctctataaaaggaatcagtgaatagtgtcagcttggggaaaaatcccgtcagtccggagactgtctgctgccggcagtgtgctgaaaccctggcaaatgtcgtttaataaatgcgtgttgcttttaagagggcctttatctcagctgggaaaatgtgtgcgcatccttggcaacctgagaatccagaagcctgaactggaggggacctgtcacagggagaggcgatcgcatggggtggctccagcctccagtgttggaatcccacctctgccacttacctacctctccagactctgcttcctcatctgtaggaggggacagtgacaatagcacctgccactctgggccaggatgtcctgagggctaaatgaaggcttctggttatctggcctaacccatgcatttcccccatgaaagtgtggctgtgcagcaccagggcctgtctcagggcaatggttggggcctggagattgggaggacctcccaacctcagcctctccaggccttactccaggcctcagtttcttcctctgcaaaatgaggaggaggaaaggtccttaggttgtcaaggcaccaagcctagtagatgtcaatgtcctctacctgctctctcagcctctgccggtcccccgaagcctgttaattctaaaggatatttacacagatttgcagttcttttcctgccactttgcaaacagggtcacactgcaagcatcgcttcatcacctccaggtttcatctgaacccagcaaatgctccatagggctcccagtgccgcctgtccccgctgcctccttgccagcagtgtgctcagcctgcttacaggcccatgccagaggggcctcatgcatgcatcaaggcagagctggttctgcctcggagaggatcccgagcctctcaggcttaaggacgtggtcatctgtcgcccccttcatctttagacacccatctgcatggtgacagctgctctgcattgagtacttactctgtgccaggcacgctagcccgtttcatcctcagaacaaccctagtattgttatcatcatcatcatcatcagacccattctacagataaagagccagaggtccagagtgggcgagacattccctggagtctcatgggtagcagagttggaatccaaatcaaaacatactttcagccagtgccaggcactgctccaaccctggggaagaaaactcagttcctgctctcaaaggacttataagtgagtctatgacagggagatgagcgcttttaaaaaattaacaaggaaatgcgtagctttttgagtgaggatgacatatcgaacaatgaagcagagccagggacattgaggtgggtagtattttagacagaatggccaaggaaggcctctcagataggcctgaaggagaggagcgagccagacatgtagatatttagggatgagagtgccaggcagaggcaatggcgagtgcaaaggtcatgtggtgagtggagaatctggcacgattgggggaaagcaaggctgtaggcccctggggccactgtaaaaattctgggtttcactctgagtgcagtgggggctgtgggagggttttgcacaaaggaggaacgtcacctgacttaggttttagaggcttctctggctgctgggggaatgtggctggtagagaggtgaggcagaggcagggaggtcagcgtggaggttcagtcagggtggtaagaagaggtcagggtctggccatgtgttggaagttgagccagcaggatctactaacagatgggttgtggaacacggatgaaagggagtcaaggaaatgtctcattctgagtccagcacttctaaccacagagcctctgacctggggagggagggggctgcatttcctgtttacaggtgaggaaacaggcttagagaaaagcaactttgccaagcaccgtgctacagacaagacataaaggtcatctggccccagaacctgagctctggacagtcttagcaccttagaagtttacctactgcatggatggggccaccagagtctgccccttccctgcagggatgtggcacagcactgagttctcagagctacccagggcaagggtgaaggagtggggaccctgagcccctgggccagctgtcagcttatttaccaggccacacgcatccccatttttggtggcttcaatgcaggtagcagtttctatcacagcacctggtttgtccctgcccaatgggtgtatccagtggtgccggcagaatgttcccagtgctggcctgctcttcagatgggcaaccgaaaccatccttcagggcgctaggttagcccagtcccaggtcctccccatctcagcttccttacagccagtgagcatgttccaaggactctaccctgagtcctgtcacctctgcgtctttgctcatgtggttccctcctcttggaatgccttccttcatcccagcctctgtcagcctttaagacctagctcaggggccaccagctccaggaagtcttcctgggtttcactctcttccagaaccccatccctaaacctcctcttgcaacaccgatcgccatgtgcgtggtcattgctcatgtccaggacggccccacatgctaagatagtctcaagggcaagggcctgtcttacttggctctgttttctgtggtatctaggacagggcctggcagcagagtgaggtttgagagggcatgaatgaatcattctgactccagaggaaatcactgtgtagtcctggctgttggagccccaagctctcttcttgggaactgtggcatccatgcagccatccactggtgcagccccggccatgaatgcagccccagctacctttcgccttcctgcatggggtcatgggctccagcagatggttctgggctagcctgttgacagctgtgccctgtggccagcacatagtaagtaggtgctctggaaaggttagcacctcctatcaagggcacgaccctagacagataccacacagggtgttgaccgccaggagcccatggcagacttgagggaagtgtgtctcctcacatcctccatcacccttgtgcttgtggaaacttacacagcaacctcatctattccaggcacatgcccagctggacacactcccgaacacaggcacacggacacctggggtgcacacaaatagtggcatgtgcatacctccctgcttgtcaatgcacacaccctcatagtcacatttacgcatacagcactctgtcacacacgtgccaccccccacacacaccctctacacacacatacacaccacactcacgtgcatgccgctcctgcatcactctcccacacactcacaccctcccacacatgcccaggccaccatgattcagacactctcctgcacacaattcacatgcccacgcccatgatccctagccccccattcagacacagtcctgtgttgcactctgacatattccggcacacaggcaccgtctctttcacactcctccttgtgcccacccatgtgtacatgtgtgtgcagatgcttatgctctgtacacgcatacatgtatgtacacacgtgtgttctcgtgtgcatactcttatgcaccctcagcacactcatgttcacatgttccattgtacagccctgtactacatcctgtgtgcatccgctttaatgtacactcatgttcacgtgttctattgcacagccctgtactatatcctgtgtacatcctctttaatgcactcttaatgttcacatgttctctgcatagccctttattacatcctgtttgcatccgccttaatgcacatttatgttcacatgtgctattgcaaggtcctgtactacatcctgtgagcaccctctttaatgcacactcttgcactgcatactctggcacacagcattaaatcacacccagaagatagtagaggcagcccccgatgaggagctgctataagtgcggggtggaaaatcgcagccttctgaggatggtgaataacaataatgatgagggaagaagggagccgggtatcactgcagccactttagaatgttgagccctgtgtactgccagagctccagccatagcctcccagaccctgggggtccttgagtacaaacaaagaatctacaaagaatccaaacaggtggcctcctgcctgtccctgtggcttgtgctgtggtgacccactgcttccgggggatgggcaagctcccatgcagtggcagtgagcacccgcctgggcaaggctggttcttgggaaatgtgcctgttggcttccttctccccaccccttgagacaggcttctggaagactcacaccccagggtaaggcagccctccccatccccgcctcaagcttcagttctaagttgatttttttttctattagaaaaaacatccatgtgggcagggcgcagtggctcatgcctgtaatcccagcactttgggaggctgaggcgggcagatcgcctgaggtcaggagtttgagaccagcctggccaacatggtgaaactccatctctactaaaaatacaaaaattagccaggtgtggtggcaggcgcctgcaaccccagctacttgggaggctgaggcaggagaattgcttgaacccgggaggtggaggttgcagtgagccgagattgtgccattgcactccagcctgggtgatgagagtgagacttcgtctcaaaagaaaaaaaaagtatccatgctaatttttttcaccctttatgaaatattttcatcttttaatctcaaaagccacacacatgaacattgttttttaagaaatcaaatatattttctaaatcccagtggtcagttctcagcccccatcttattgcatctctcagtggcattcaatgcaggtggtcacaccctccttggccaattcaaagaagagaaaggagatgtggcgggagaagcaggtcacaggaaggggccgggagatgggatctaagatgccagcaggagcctcttgcccaggggggttaggtacattccagatgtaatcatttgagtgatttctttgaaatccatctttgcctcgagggtggaagctccatgaggccagggacacagccatttcacagcccttagctcagggcctggcacagggaaggatccagaatgcagcactgaccgcacttgctgtggacactgagttcctcttacagcaaacatatggtgaccacccactgtgctgactgctccccttaggaaacgtgttcgtgtgttttgtttcattactttttaacttttttccaaaaccaataaatgttcactgcaaaaaaatacaatatatgatgtattataaagtaataagaaaacatgccgaccccatcctacctcagtcccatttcccagatgcaacacaccacagcatgccatgtttaacttatcatccttgcagacctttttctctagacatgcgattgaccaatcaacaaagatttatcgagcgtctacactgtgccaaccacagtagcaggagctggggaaacagtgaacaaaacagactaaatccctggaggagaggttcatttaaacagtacacatacggtaacatacatcattacatgtacaggttttttaaaaaacaaaatgagatactataaatattcttttgtgttcatccaatttagagaagctgaaacaatgcccaaagtaggaggggaaaaaaagagaaaaacctcatgaggtttagattcatgatccaaagagagttacattttatagctttgtttaataccctccagttgtttatatatagttttattttacaaagtcatgatcatacagagggtatagatttttctccatctttttttttcttacaaaagaaatgcaaacagaaaacataaacaagagcaaaatcccatgtaaatctaccactcaatcatggctaatctttaatatcattgtttttttctaaaattgggagtttgggatcacactggatctactacttggtaacagactctgatcttgtaacacatttccattgtaattctataccatcattttcatggctatagacttggcctatagctgtgaaagtagattcaccataatgggatcagccaatctcctttccttggatattaggatattttcaattttttattttcatacagacacttaagtgaatgaagcaaaatgtctgcacatattcttagttacctaaaggtatgatgttagattgtttttcttcactcatatttttactacatcagaatgttgattacagttatctttgatggtatgatgtgagattattactttgtttccatacttattttctctaaatgccttgcaatgaacaggttttatttgcataaacacaatattatttaaaatgatgccatgaaaatttctatatgaccaccgttttcatggtaatggcttgttacggctgcctgtaattccacataggggataggccgtaattcacttaaccatcccctatcattgaccggctgggctttttctaatgtctttaagatcgttatacaggaaacctactccatatctggggttacgtcctcagggagcagcccagcaaaggctggtgaacagatttcacacctttggttcatcctgccaagctgctttcccgaaaagatgttccaatttcccctcccaccggcagtgcgtgggaatgcctgcccagccgccctcctctccctgagacggttcaggcccctggacagtcgcatcctctgctaggagggcaagagaaagcaggaaataatttggccagcaagtgaccccagacccagagccaggagtgatttttaacaagcctgattctcagaacagaacctgcagagaaaaagaaagcaagcaaggaaaaaaaaaaaaaaacccctctctactggaaaaaacatacacatacacagattaaaataatatttggcacttacgtcgcacttttaaaattcttcaaacgctttataaacactagctaattaattaagccgcctaaatctggctgcagtcggtggagagagctcgagaggagctaaaaaaaaaatgggggagccagcgctacacaactccagattttattgtcgcctgcctggggtgtgattacaggcctccggctgcaccacaagaatagccctgctccaacatgctgcacgcctgactccgcagcctctcctgcgcctcctgctccctcaccaactgctgactcacagccccttgtggtgttattgataaggataataataactgcaagccaggctgagtcccgggctccgggcctgcaccctcccctggatatgccagtatcaactccacctaacacatgaagagagaggagatttgcccagggtcatggagccaacgacatccttccttccttcattcattaccgcattcattctgcatatttttatcgatgacactgtgttttaggcaggaggttggaaacagtcccttgtggatcctacatcctactattgggaatgtgacaatccagagaaaatcaaatatgtgaataatacagctatgtgataataatgggaataagaattaaaacttacccagcacctatgcagcaggcataccaccgtgtcagggtcctcatgactgtgctggggtggatgccggaaccccacttcatggatgatggaatgggggtccagggaaggtgggtacagaggtggctaagaggggagccatgctgtcacccaggcctgctggccctagcaactgtgcttccccgaggcagcctttccagttggtccagtctcgaggctgaaatacagacctatccggaaagttcctagctcagtgctgctggtgctgcctctgatgtccccgcctggatgggcctcccgggcctcccacacatttggccaccagcctcacccctctcaggccgtctgatgctggctgggcctctgtccactgtgggttctgtctgtccactgtgggttctgtttttttctcctgtgccatgaagatcttgccatgttcaacttcaaatggaaatgaaatgagaagctggacttcctgataataaaagcagttgaggtcttaagtggttgatcaggaaaaggaagtcgaaatggtaatatttacacccaaagcaggtggagtggtcttaggcactctgagactccactcacctgccatgagaaccgggccccaagggtgatcccttgccagagtcaagactgggtgaggctgggaatgggagaaagaggcaggacaatgggcagatagccctgggcttcctgcagtgagggcagataggggtctgtgagcctctttccctggctgccctgcccctgccagtggggtggtgccaggccatgggttggtgggcaaattcacagggtctctctcctccccagccagagccagaggggcacagcagctctggacatctgccgcagccttgtctgatgtacaaggcaaaggtggcccaggtcagggcaggacaaggtcacatgaagggtcagtggagagcccaactggggccccaggtcacctgtcacctgcataccaggtagctgccactcctctgtctacctggttctctccttctcccctattctagctcgctctctcactctgcgtctgtctctcaggcatgtgtttctctgaggtctttatgatcatgatctttcttttttttgtttcttgtacctcaccttgttcagaatcgaggccctggctctgccttgctctgaactgttctcacttggtccctatccatcttcaacgcatctcatgacaagctcgtcctgccctcttcctgtctgggctccccccgtgcaccccaatctctccacccagggtccctgtcttgtgtgccccagtgtctctgattggggctcaggctcctgcagccaacctctacaattccttccagctgcccatttgggagcccttgaggcctggactgggtccagctccagtgtgtccccatcacagtgaggcctggatcacagggcatcagcaggtgttggtgagagtgaagtttgagccacagccacctccttgtttattcaatgtatagtaacaacaacttcctcagggcccatctcagggctaagtgacttctatgtgtgatctcgttttcttttcagaacaaagcagaggcctgggggctgttctacccatcctgtagataagaaaactgagactcaaaactgatggataaattaaggtcccacaagaacaaggggcgagccaggtttcaaaccaggtccgatgactctaaagaccagatgctgcatttggacgctgtccccagccttggcttattttatcctcccagagatccatcgaggtggggtcatagtaactattttacagatgaagaaaccaaggctgagagcagtaagggcaaactaagggcagctcttgcatttgtgtgacactttgctagccaggctcagtcctgggttccaggtggggactcaaacacactggcacgagtctacattggatattcttggttacctgagtggtggcccaaggacacagctataggccactgatccagaactcaaactacattctcctactgcccaaaccgctgagtacagcctcccttctcggggcctgcatcctgggccaggccagaaacagaatcttaacaccttgtacagccccagatatgccaggcccctacctctgagtctttgcccaggctgttccctctgtctggaataccaggctcccttctggctcattcagattagaattagcccagctcagatgtgactcttccagagagggtccaggcattcaaacccactctctgccatgtcatttagctttctgtgcctcagtgtccccacttagaatacaggctcatgttgcaggtttgttgtgagggtcaaatgagatgatacatgcactatactgatctcacagcctgcttctggtgtgcatccagtcaatgaacgtcattgataaacacttgaggaaacacagaggatcacgtaaggatgaaaaaatgactgctttgtgctcctttccaggagtggcgggtgaggaggagctgcaggtgattcagcctgacaagtccgtgttggttgcagctggagagacagccactctgcgctgcactgcgacctctctgatccctgtggggcccatccagtggttcagaggagctggaccaggccgggaattaatctacaatcaaaaagaaggccacttcccccgggtaacaactgtttcagacctcacaaagagaaacaacatggacttttccatccgcatcggtaacatcaccccagcagatgccggcacctactactgtgtgaagttccggaaagggagccccgatgacgtggagtttaagtctggagcaggcactgagctgtctgtgcgcggtgagtacagcgtgggcctcctttgcctctggtttgtgacagtaactcaataataacaccctccattctttgagcaatgatcaggtgtggtggtaggtgctcctttccatgaattgatgtctcccccttttacaaataagggaagttgaggcctgaagacgtcatgctatttgctgaaggctccacagctggtaaagggtgggaacatctgcatccttcatctgcctggctgtgtagccctggcctcttcaaagctgacccagccctttcattccacagatgaggaaactgacagatagtgtgacttgcccaggcacaggaccagacctcacctgctgcctccagagagcacttccctctcagggcagccgagtctcctctatgtgacaggcactcactgagaacctactgtgtgccaggctccgccaagcttgtgttctcatcccttccaataagagatccacccagggcagggagcagagagggtgtgtttcctttatttcatcaccaaacaccaactgagaagattcctaaaaggcacagatttactgtttaatctgatggccctggtgagaggagaagccagagggttgggcattttctgtgggtcttttagaaaaacacttgtgtgatttagggactgattcatgcgtcactaaaggctctgaacaaagctgggtcatcatagaatgtctctcaccccagggaggaggtctcccttctaggtgactttgggttcctccgttaaggcagcaaagatgctcattttgtatttactgccagagccccaggatccttgttctaactccgaatcctgggacattagtacaggaaggaccctcagaccatccagcccaacccctagttacaggtggaaacttgaagtcaggagatgacaggggccttgtccacagtcataggcccagttagtgacaggatctggaccagagcccacatctgattccagggaggctccttcattagccattgtttacatagaagagcctggtgcatcataggtgccgactgaaagctccttgaacagaactgctaagcaggaagccagcacttctcctttccatcagtttcctaaaggttcagaatattcacattcagaccgttaggcccactggtgattggaaaaccgctcccaaatgtaagccatatcatttgatactgagatttcatatcaggatagagacctgctccattgtgtaatagctacagaatactccagcttatggaaataccagatttattttaccatcttccattgatggatacgtaacttgtccccaaacttgaactattaaaacagtcctgcagtggatgaccttatacatgtgtgaccttactcaggtgggagacgcccactgcaagtgccattgctagatcagagggggtgtgtgttttaatgtgtgtggatatggcctaatttccctcctagacattataacaatcaagtctccccacaaccgctggacataggcagggagggtggctttatcctgattgtgcagatgttacaggaaaagacgttgaagttcccagatgatgcatctcgtgcctagacaatcacagcaaatacgtggctcaggtgtgacccagatctgctgactcctagcagagtgctcactcctctttgccatgctgtcagcctaaatgatgccctggatgagaaaggagggaggtgggagggggccagggagcagcagctggattggatcctcatcctggcactttctccttttataacaagtacttatgaaggaagagccatttcttgccccctttacagataaggactctgaggctcagagaggagacctgtgtggtgagccagtgggggagccaaggtttgatccccaccagcctgactcacagcccctgtctctgtaacactcagctatgcttgtcaaagtgtggagaaatgctccaccctactcattccaaactcttgcagttctatagcaataagcataggctgaggcaggagaatgcttgaacccaggagacggagattacagtgagccgagatcgcaccactgtactccagcctgggtgatagagcaagattctgtcttgaaagaaaaaacaaaacaagtcctatgggagtaggagggactggcccccatcagaaaggtcctgcagatgtctcatgatatgggaacttgttcctaaaggacaggtctcagcacatcactgagtagcatccatggagcagagttgggcctcctgcagcccagcagaccacgtgcccacctactcacggtgctgaggactaaggatgaggagatgaggcatttcctggtgggtgcttggggctcattggagcaagagtttatattatcccctcaggctgtcaggagcccactgacttcagtttatggctatagggtaaccagatctgggtaccctggagggaggcttctccctagaactgcatgaagtcagggatctcaaagggaaaaagggaaggtggtggtcagtgtcagggttcatgaagttcaggcacttgctcaattgattgacatgagagcttggggaacactggaaatgcccattgggtacatgagggatgaggagacagtgccttcgcttttctcagcctcagtttcctcatctgtagaatggtgataatcagggactcctttggcagagtggaaaggatttgagttcctgtgtataaaacacccaatgcagagtagacacccccaaatcaaggttttttgtttgtttgtttgttttttctttttttttgagatggagtttcactcttgttgcccaggctggagtgcaatggcaccatctcggctcactgcaacctccacctcctgggttcaagcgattctgcttcaacctcccaagtagctgggattacaggggcacccaccaccacaccagctttttttttttttttttttttttgtatttttagtagagacatggtttcatcatgttggcccggctggtcccaaactcctgacctcaggtgatccccccacctcggcctcccaaagtgctgggattacaggtgtgagccactgcgccctgccatcaaggtgttattttaagatgtgttaccttgggcaacccagttccccttgctgagcctcagtttccccatgcgtagaacgtcgataattgtaccaacctttccaggatgttatgaggatgcaatgagcctggggcgacgatagaccttagtaagcaatggggttttcccaaggtcatgtgatcttgggcaaatcctggcttcccttgagtcctcagcttccctgtctatgaaatgatgatgatgattgccaaccctcacaggttctgtgaggattggagaggatgtacagagcctcggaatggtggcggtgttcgggttatcactgagctcctgcagaagtgtggttaggagagtgtggccagagtccaactgcctgggccacatcccagctctgccacctcctggctctgtgacctgggacaaggcactccaccaccatgggcctcagtgtcctcacttgtcagtgataacaccaacctcacagaccaggagttgggaccgaatgagttaaatcctgtagcgtgcttagggcagcaggcgcctggcctgcagtcaatgttcaacagatgtgagctgtgtgatgctgaagccatgcaacctcagatgggttagtgctcctccaggcctcaaggataaatggtccttaggatgtactcaggtagttttcaatcttggctgctctttaggatcatctgggaaacattgaaataaatcccaggctccaccacagaaatgcctcttcaattggcctggcatgggcctaggcatctaaagtttttaattaatccagaagattctaatacagagtcaggactgaaaacccctgggatagacacccagaggtcacggaggacaagttggaaaagatggtcctcttggggtgccagatgggagaacagcttttcagggtgtggatgcttctgaacaacgtgcacccgggacagctctttggaggccccagtggcctggccagaccccctcttatgatacaggcctcgggggccaaggtaggggccccagacaaagccctgctcagatccagcctcagtgtggggaaaccttccatcctgaaaatgtttttgtctaaatgaccgccggaatcccagcaaatccttccaattcggccccagaaccctccctgcctcgacacaccaagatgtcacggaggagtctgttccctcctcctttaaaatgcttccagcttctgtaaatggctcttctggagggaggcgcctgtgatcttgtgttttgaaagccaattcgccaaacttgtttcctgaggggattgtttagaaaaggggagagaatcctcacttggtggtttctgctccttgtatcatttgggtttgtcatgagccacagggagcagggtttgagccttttcttggtgtttctgctctgctttgttctgctgcctgaaggataaatgtgtagattcggaagcagtaatgaccagacctcctgataacagtcacaggggtcatttattaagcacctgctgcataccaggctctgtgcttgcattcatcctccctcttcttaacagggtggggtttgtatccacttttggccctgggcctctctgagctttgtcctaaaaggggctcacacgaggatcccctcacagagatggagtgaggattaaagagctgacgggcatggagggagcagccagtgtccagctccagagaagccctggataaatgggaactgattgcagcccctcagccctgtggggacatccaggccgctggcctcaatgacttgacttcttcaagtgacaccctccttactgtgccctcaaaatgtttgatgggtgtgagggagaagttaatatttacaaatgcaagtatgtgtgatatgtgcttcctggtgactgcgataggaggtatggggtaatgattagcaatttggagacacgtttacgacccatctgcagggagaaacagcccgcgttctgattcagccatgtgtgtgctttcaggacccaggaagtgcttctgcctgcttgggcgccctgtgtctgtgtaattaattgataattaaccactttggctttctccacacttggtgatctttagtgtctatctaaaactgacaccaaagaagaccgcagattcagaaaagtatcccttcctttcaaatttagcacttggcacagattagaccctgctggaatatttgtggagaaaatgaaaaatatgaagtaaattcataaatacctgaagagagagctttggatatgaataaagtctgggttaaagttagatctgtttttgcttatttttgtgaagcatcttctgtgtttatccaaagcaaaactgcttctgttgcctcatttaatcctcgctgcatcccagaaaggagaaatgctgctgttccattttacagacaaggagctgggtgtgccaggccgcccctctcatgggctgagcggcctggttccagctctcatggtgatgccacgttgctgcttactccctgcactgacctctataaacgctctctctgaggttggcactgttgccaggggaggcagggtagaaacagttaataccaaggatgagatggatcgttaattttgatcctgtgcccaaattgctggaagtcaccctgtgtggagtggagaagtttgaactcaggcctggacttccctctgggccctgcccctacactgtctgacctcacatgggtcctcacctctcccaacctttgcatcctgctctgtaaaatgacaataaggacaccgccctcattaatccttccacattattggaaggataaaaaataatgtctcagaaggttcttaacgtgtcacacacttatcgttagtgattgtcatctgagtcatgtctcctgattatcgatggtccttttgtagccaaaccctctgcccccgtggtatcgggccctgcggcgagggccacacctcagcacacagtgagcttcacctgcgagtcccacggcttctcacccagagacatcaccctgaaatggttcaaaaatgggaatgagctctcagacttccagaccaacgtggaccccgtaggagagagcgtgtcctacagcatccacagcacagccaaggtggtgctgacccgcgaggacgttcactctcaagtcatctgcgaggtggcccacgtcaccttgcagggggaccctcttcgtgggactgccaacttgtctgagaccatccgaggtagaagaccctcacccagcccaagcccacacctgaccgccaagcccaccccccaccaccctccactcatccagctctactcttgctccagggcttgaaatgcctggaacctaaattcctaactgcccacctcccatgcccctagatgtgccagccacttactaacattttaatggcagtggctgggtgaccacaccacccaccaggtgccaaggactgtgctagccgtttcatttatttcactgatagcaaacacagttaatgagtacctactatgaactaagcctctatgtgcttggtgattttctttattttgctacagttacaacattccaactgcatgccaggggtggtgcttatagatttccctcattcttagcctagtaggagctaccagtccttgagcacctactgtgtgctgggcgttgtgcttagtaatttcattcatatgcaaagagcaccctcaatgtctgagcacctgatgcctgcctagctctgtcctggtgatgacctcaccgtggtgggggagctacgttatggagccctccctgtgatctgtctgtgccacaaggtcagagcttctgccctgtgctgtttcagttccacccaccttggaggttactcaacagcccgtgagggcagagaaccaggtgaatgtcacctgccaggtgaggaagttctacccccagagactacagctgacctggttggagaatggaaacgtgtcccggacagaaacggcctcaaccgttacagagaacaaggatggtacctacaactggatgagctggctcctggtgaatgtatctgcccacagggatgatgtgaagctcacctgccaggtggagcatgacgggcagccagcggtcagcaaaagccatgacctgaaggtctcagcccacccgaaggagcagggctcaaataccgccgctggtgaggcctctatttcagctgacccagcttttttaaacttttagttttgtgggttttttaaatgttaaaagtagtaattcatgcttattatagaacaatctagaagtctataaatataaagtagaattttaatgtcagctccatttccccaaatcccacactccaagagtcaccactggtaagagtttgatgcacatcttgatagatcttttgacatagatttatatcacaggaggaaagagggagagagggggcccatctgttcatggtgtcctgcctcttgccttcttcacctgacagttgtcatgctccccattcctcactggcccagcccctcttccctactctttctagcccctgcctcatctccctggctgccattgggagcctgccccactggaagccagggtggagtcattcagggtgtttgcagcttgtctcacatacagtcagtgcttcagtgaacatccttgtgcatgttccatcccacatgtgactatttctgtgtgattgcccaaggaacactttaggccaaaatgcatactcatgtaaggaggagataatgctgtcgctcccctgagagagtgtgagggtgtcaaggtatcattttctcagcccttgcaacgtggtgttggtgtacatctcttttgttttcaaatggtggcacctgattggcatttcagtgcagccatggaatatttcatcacctgttatcaatgtggctgatgccctgtacatagtagaacccttgaatggattagaatggaagccatttctgtccttcatgcacccttcagggaagctctcaaagacagccttggggctgtgtcaaagtggccctttggtttcaccaatgccaggttttcttaggatgtgtagggcatcggccaatgctgggttttcatagtacgtgtggagcattggccaatgccgggttttcctaggacgtgtagggcatcggccaatgccaggttttcatgggatgtgtagggcattgggcaatgctaggttttcatgggatgtgtagggcattgggcaatgccaggttttcatgggatgtgtagggcattgggagacaggatgtgtggctttccacgccagctatgttgcatacttggctgtgtgaccttggacaagtcagtgcctctctctgggcctccacttgcttctggctgtgttgaaggggatgagcttcatgacccctcagctctgagtctcagctggtaggggccatgattatcttgctcagcattgtagcttcagggcctgaccacagtaagcactcagtaaatgctttttgagtgaaagaggataaaagagtcagttggttggctggttggttggttggttggttggttggttggttggttggttggttacataatccttagttagccaatgaggtagagatgactgttggccccagtaacagaagaagcagccagggtttggagggaggcttaactgacttgtccagggtcacacagctacttagtagcatagatttgaaagcacttttctgtggcttagagccctgcttctgatgaaccactgtgttctagtctatgacccccttacctgtgctgtgggcagtcaagcctccattgtattttcaagagtcctggttcagagcccctatgctaactcctgagcccagtgtgcatggcccaggtgctgggcacagaccggtcgtcagcccctgagctgtgcagagcctgctggccgcactgcccttcttccagctgctgattcagtttccagtggatctggggtgccctcatgaccgctctgtggttcactccagatgagaaggaacgtttctgttcctcaggagtgagatttctgcctgtatcctgcagcaggggttcctccgtagctgtcagctacaaatatattcccccctggcacctcagcatggtttttgtgctgttcatggatgagtctcgtgggcaagtgtgtacagacccatgagtgtgcccatgtggctcgagacatctaagaaggtccagccagatgttctcagttaatgatgcctgcttagtggtgaaaagcagtggtgggtttggttttctgtttttaatctgcatacgtgaagcctctattccatgtggtccctagagaacactggatctaatgaacggaacatctatattgtggtgggtgtggtgtgcaccttgctggtggccctactgatggcggccctctacctcgtccgaatcagacagaagaaaggtgggtgcattcccctcttcctccctaagggtttgtccctggactgtcctcggagggagacgccattaggtgctttgggttaaggacatcagcttctgccagtagcaagaagtccagaggtagtggtgctagggctggggcagtggcctcaccatgttagagtctgggtgggtcactctgtggcttccccctcatggttacaagatgttcatcactgccccaggccccgtgtcctcaaggggccactactgagcaagggagctgccagcctgggaagagaggaggcagggactcttcttacctgtctcagggaggacatcgtctttcccaggagcctcccggcagacttctgctttcctggtacaagtctaggttacatgaccagtccctggacaggaggccagagggaatggagataatagcgccaccatttgattgggaggacttaacaagtgattgcatgggaaatgttagggaagtaacctggcacacaagtgctcaatgtatgtcagccctgattattacccgtattgtatgtgagcccagaaatatgagccacctccctagaaagccccctcacagggcaaggtgcatagcctttgactgcacagcaggagggcacagggtcaaacccaggacaccgcttccccttgtttgtgtgcacgtgttacgtgtgtgtctgtgtgtgtgtgctggttgttgggagggttggttgttgctgtggcagggcctctgactttgaagtcagacaaaccagggttccagaccctggttatatactgtaaacaatcaatttggcctctacaagcctcagtttccccatctgtaaaatgggtttagcaacgcctgtcttggagaagttacaagatccaaataagcccatgtgaaataacgggtctgacacattctaggatcgccataaatacatgttctctttcccactcttggagaagacaattttaagctggtatttctgcaacctttttttattacaagagatagaaatacatttcacatctcaacccaacacatacacacaccctttgtatataaaattaaaactgatattttcttttttgtcatattcttttttctgtttaaaatgctggttgtgacccaccgcctccaaagggacaagtgctgtcccgagctgcctttctgtggcctggcacagctgagcttggttgggcacattgtacactaatcacgcatcccttcagtagctccttcacctctgcctcccaagtttccctccctcctgggctggctctgagatactggccaagcctgatgcttctgtctgggagggttggagtcaggccctgcttctccagaatctgcaagacgtcccaccaagacgtctacccaatgggttccctaaagttcctggagagccccacacagggaggactcctccttggatggggaagcaggtcccttccccaccaagggtgacagcccatcccatgggatgaagcattcatagcagccgatagtgaaatcctggccatcctttctgagtctcaggcccaggcagcacgccagctcctggcacacgtgagctcattactgtgggcttaggtgttgcagaggaatggagtttgcagggctgcagctctggtaaaggccacccagcccgagtggcaggtctgtgtgcagagcctagctctcaaacacaggctccagtgacagggacggctagtatcccccagcagttccaatgtgccaggcactgctcactgtgctttccctgtagtaacagtcagtgctcaccacagacctcatgggtgacattactaaccccactttacagatgaggaaactgaggcatgggaaagttataaaacttgttcagggcctcacagccaggaggtggtggggccagaatttaaacccaaggaccatgtctaggaccaccttgcacactacctccctccgccataactagaccccccttctccctcattaggccctggaggggtctgcccagcctctcaatgctcacagtgaaatgtcctgatttcaactcaaccactacccagctgtgtgaccctgaggagtcacctagtctctctggtgtaaaagggggtgactggtgtcctatcactggattcccagagatgacttgtgtccagcactttgcaacctgtcagcctccactcagactttcggtgctgagcacagcttccaactggtacacctcatctaaagatccaggacctgcccaggcagcaagcgttaacccagcagcaagaattcttgcactgtggcagcctccagcctattaaagtgcggtgcagagtgcatttgggtgtgcatgttgctttttaattacaattttacagcaaaatgggagtcaaacggctgctgaaccctggaggcttctctgtgggttaccccatatcacaggtttaaaacctctgaaccagatggacactttctttccttccaagatcctttttttggaaagtggtggcatgtaaataaatggatgctcagcccaaccctgcaagttatagaagctgagagagaggaagtgacccacccggggtcacatggtgagtgagtgggtagcagacccggggttcacacatgatccccgatttgcagccctgctagaatctgttttcaagccacgaagggcactgattgggacctaggcttgttggagggtctccgctgaggtttgtggttgaatggaggtgagacccagacagaggtagggcggttgtcgcctcccaggctgaaggctgcttttggacccctggcaacttccagaagtggaaaagcaggaccatctagcttactccttcccaggcttccttggtggaagaggatgcccactgggtgggcatgggggtctcctgtggttccaaggatgtgattacagcatttcctctccatgtccctggaggcaaaccttttgccaaaaaatagttacataagaaaagtgtgcttctagttaaacaactggcttttgtttcttttgtctttcagcccagggctccacttcttctacaaggtaagtgcatcattggtccagaccctcttgcagttattatttggttatttgacagccccccagactacaaagcataatccatgtccactgacctcaccaatgtgttggtcaacatgtctctttctctcctttgtaacctcctcacactgggtcacgctgtttttaattattgtcccaaatgaggggtttttttggtgcacagaggtgctaatttcttgcctgctcttcccagacaacgagacccttgtctaatcccatgtggactggggcagagacctcccgggctttctgtcctcacagacatcctgcacacgccaccggatgcatcctcccagatccaagttgtatactttactctttcctttgtttagtaaatatttattgagtaccttggcgtgctgtgaccctggaatgccgggatgagtaggatagaatctgtgccctctgcaagctcacagcctggtcagaggctcagacggtgacattacatcactgatgtacgtcaccgatggcactttagtttgttgattcacatttttagtgacttgagtccctactatgtgccagccctgctcaggaccagctggtgatatagcagtaaacaagaatcagcccaggctttcatggggctcagacgccggtgagagaaacaggcataaacgcagaaataaagtgattcatggtgtcatatcaggtggtgacaactcctaccctgcaaggagatggaggtgaatggtggggggctgtcttaggcagaggaagggactgcctctgaaaaggggatgcaaacgggtgcctgaaactagtgagctatgttggacaggagcatgctgggccagagaggaggcctgtgtgctgggccagagggaaggagaggaagaagataaggtcaggaagacccaggtcctcggcatcccggtgtcctttgcagatgcccctgcagtcagaggtgttacgaactattctgtgaaaagcctttatcggctttttggaaggcctctgatcttcatccccagcagagcagaggcagcacaccatcatctgccatgtgaacccatctgcatagaaccatgtggacatccgtgctaagagtgataaataaaactataaatagcttcatgttggttcacaccaggttttgccagcaactgcatagtgccaatcttttgatggtttagagctttctgggtttcagaattacagaataggacatgatgatctggagtggggcctgtgggtgttagaaggactcgggattttatccgcagtgggatgaggaaccaaaagatggacacgatctgacttttgttttaaaagtgtcgcctggctacatgtggagcccagactacaggaggtgaggatgtgtaggtgaccatagcggtactggtccaagcagaaaaagatggtgacctggaccaaagtggtgggatgggctgagaagtgctcagattctggatatattttgaaggtagacacaagaggacttgctgatagattggctgtagggttaaggaccacctcaaggttgggggcagtggagtgctgtatcctgagttggggggtgcaggtgatgggtggagtgatggggcaaatatcaggcaaagcagttgcatatagcaggagcagctcttctgccagagaaggctctgggaagcatcaggtgccccgctcctgcccagcagtgtgagtccaaggtactcttgggataaagccttgcttcttgctctgatctccacagggggcctcctggtctgagccctgcccagcctcctggccttttcctcccctgaacaagcagagccgcctctccagcaaaactaggctcttcactgccttctgggcacatgtgttttccttttgtcatgcttgtgcctgtcacactcccacacctaggtcactcttccaagggcaagactcgtttatatcctttgccaaaaaaccttcagtggctctacctgtccctccagataaagtccagatgcccccctgaggctcctgggccccttgtggtccagttgccttgaacagtttcacttctagccaccccctgtcctcacatttcacggctcaaccacactgtgctccccccttccctcctcccacagtctgccctcctcccccttgcacactgccctcactgctggggtgtgctccctgcccctgctcatgcactacccagggtcccccagctccaggggtggcaggcacagtgggctctgtgaatggcaccccctggagttatgcaatgtggtagctagagtgggacccctcctgtcacctgctcacctcctgcttctcctgagatcagcaagggcacgacatcctccagggtcggagggcttcctgtgaaccctcctggtgccgcagcgtggacaccctggtgtgttcaaggtgtctctgcacctgtcccatttcataacccacccctcaaggccagggccaatgtccctgaggttcactgcaaatagctgctaaacttggcaccatgcctggaatgggataggtgcttagtaaaggtttactgactgaacaagtgaacaaacgaatgaatgaatggatcagtgcataccatcctaaaccactgtagcacgtcccactctgccttctctgaatccctaaaatgctgcttcccagtggctacacagccccatctaggaggatctctcttttttgttttttttgttgttatttttttattttttatttttgagacggagttttgctcttgttgcccatgctggagtgcagtggtgcgatcttggctcaccacaacctccgcttcctaggttcagatgattctcctgcctcagcctcctgagtagctgggattacaggcatgcgccaccacccccggctaattttgtatttttagtagagatggggtttctccttgttggtcaggctggtcttgaactcccgacctcaggtaatccacctgcctcggcctcccaaagtgctggaattacaggcgtaagccactgcgcccggccctgttgtcattattttttacttgtcttacctccccgattagacaatgagtttctggaagaataggacattgtcgataatagtaacagcaatagcagctaccatttattgagcacttactgtgctcctggcactatctatgcctttatgtgtattaacccacttgtgattttaattcttgcaggaaccctatgatttatcactgtcccaagttcatagaacagtgtttttcaaacttgagtgtgctacagaatccccaaaggacttgttaaaacacagattactgggccccacccccaaagtccctgattgagaatctctatttccacaagttctcaggtggtgctgatgctgttgttccccagccacactttgggaacccctgttctagaaggttcttattccctatcctatggttgaggaaattgaggctcagagaagtcgtgacattcccgaggtcctgcggctaggaagcaccggaatgatgacttcagcctcgacatctcttgtactaaagctagtgccttcatcactgttcccatgcttcttgctgtctatttcttcttccccagagaaaccaaccgttttctgcctgttttttatttttccagcgtgagcctaccaagggagccatgagatcacttgctccctttcatctctctaaaccaaagcaatagctagtgagtgctaatggtggtttcccatgtagcagccagcttcggctttggcttgctgggatcagacattttccagaggacgttggtgtgagtaacagctgagcacctcagggaggctgcaagcggggaggctgccactttgagctcaaggggttcttcaggttgcagggctggtggagggattggctctctctaactccctgggttaggaatgtacagacagaatattgtctgtaatcttccccagctcagatgagagaaaaatgtgtctctgctcccttaatggggcactgatcattcgatcagccatttattcacttgtcagacattcactgcatttattcttggaatatttagggcttccctgagtctttcatttattcgtcgggactgagcctaactcagtgccaagccttgagcagagggttgcaaaggggagcagaaaaggcccacccctggtctcatggcacttaagagccagtgagaaagattcattcattcattcattcattcattcattcagcaaatacatatggactgctgacgatgtgccagcccagttcttggtgctggggcttcagcagtgaatgagactggcccagttcctccctgtgtgaagctcagtgtccgctgaggagacaggttaccagacaagctggaaagttaataagggatgtggtgcagctgctgactagataaaatgaagccaggtatgggatagagcagatcaaggaggtggggtctggggcgagcagggagggcttgtctgcaaggtgacatttagaagatcactgaaggatgaggaggttccagccaagggaatatctgggacaagactgcaccaatcaaagggaacagccagtgccaagaccctgagacgggagcagtcagatgcatgcacagaacgcagaggaggccagaggagctggagcagagcagaggcaggagagggatggagcctagagcagttggccgagctgagccttggagctggtgtcacttgaccaccttggagtggttatagaggggttgagcattctgagcagaaaagtaacatgacatcacttatgcatttcagatagggagaatggagggcagggaagcaggaatagaggtggggagatcaaggaggaggttcttcaggaatcaggggagttcggatggtggagaggatggggtggctggctttgatggatattttggaggtggagccgacgagccctaggttggattagatgagagctgtaaaggaagagagagaagaatcaggactgactcccacttctccagcctgagcacaggatgaccgatggtagagctattcactgaaataggaaaatccaggggagacacagatatggggaaaatgataattggttattgtctgaaattgctttgaaagagaagaacccaatgttttgagaatggagtttgggggttcagtgaatatttccccaagaaaaggctgtttaaaaatagcatctgaaggaagaaaaggattaaagcagattaagaggcagcagcatggagcatgcaaaggccctggggcagcctgactggcattcattccaagtcactgtttttgagcacatgtggtgaggaagcatggcaggcaggcaggcagacagcaatagaaaccagatatgcagatagacaggagatctgagattgtcatggaggggcagcccagccagcgcagcactgtcagcagagccatcacaaggtgacaccatagttgagtcttgaaggaaacaggaaagttagccaagaggaaaaatgatcaaaggggtccttcgaggctgctattgaagcatgaagtacataacatcaaatgccaccccccccccgaaatatctggtgggcagatgagtgggtacatgagggcagggcagtgaattagcctggaggcagcacgtcagaccacgtgggactctgagcagggcgatgagttggacttgaaccagccagccagtgggaagctccaggagggctggaggccagtagtgtggggacagatctgcgtgatcttccccagcagacgtgcccctgctcctggagggttctttctgtggccacgtggggcttgtcatgtctcagaactgctttcagagccaagcactcatgccaaatccattaataaccctgctgccaagccccactgctcatttctgacattatccatgctaacatccccggggttgccggcttgagaatttacacaacttctgccaagccagtggctctggtttgctcatcaccttgaccgtgaccctccagtgagtcaagtcatgacctccaattacagaagcaagtgcacgaacaacttctttgattaacttggacatcttggtctttttcttttctttctttaatgatgatacatagatgtttataatacagaacatttggagaatatgggaaactaaaaaggagaaaaaaaataccatgcaaagaccactgcagtttgcattttgctatgtttccttccagtgttatccacacatttttcataattgagataatcctacagagaattttcctttttcacttatcattttaatgtaagcaattttaacttaaaaaaaaaacctcctcataaaccttttaaatctttatctgtggatttatcctaatttccctaaccagtcccaattggcagagccctaagacataaacctcctcccccatccagcccttgacaaatgcctttgtgttgaaagctttttctatattttgaattcccccaaaaaaaagtgcaattatgagtcaaaggatgaggacatcttccaagctcttgattttgccagctgcttcccaaaaggattgtactggtttgcctctcccaccagtgacgtatgaaagctccagttcatttcaccatagcttccccagcaccaagtattataatttttaaagatccttgccaatagagtaggttaaaaaaatgatagtgcattgcttagaattcctttttagtgagattgacccctttgtccaaacatttgatatgcagttgtatttctgttatgagtccttcgttcatgtcctcaacccatatagaaaatggagcctaaatgttattcttatcagtttgcatgagcacttgagatagtgagggtatttttatctgtgtgtctctttcctttttaggttgcatgagcccgagaagaatgccagagaaataacacaggtacagtccttggtgagatgcccttcctgggaaactccgtggcgtggttgcttcacatcaaccggaattgcagatctggttctaaattaagactccttgtggggtggagggtggaggatcttacactcctagctttccccatgtcctgtgcatattccttctctctactgcagccaagagtggctgttgcagcctcatgactcagtgcgacccattgcacaactccccaggggcaccattcacaatccgtcctatgaaaatggtgccctggagtcaggctgcagctcccttagtgtggatcgtgccttcccatctctctacatttgcccaggcccatccctctaccaggagcgccactcccagctcactgcccgctcctcacagccaggcttttctatgctggaactgcaaagcccagcctgccagggcctctcccacctttgctgatggaaagaccccatgtcattaattacctcacacaagggcacactcactcaagctggaggtttctggtcagcattgctgagatgattttgcagcaacacggtttctgagaaacctagccctgcttatcaccggctgatgctgtcagaccttgaaggcagagggctgctcagcatcttgtaacaagacaggccctgctctgaacccggaacgagagcgcgccagctgtccttgacatttccaaggcagttgtcatctttttagatgtaatctgttgaaggagtcgggctggtgaaaggcgcagcatttgtagaccaaaatgccttggccctgcccttgtgacccatggggtccccccgcagccccggacatgagctcgagttgtaattaagaaaaaacaatttccagtcatgagcgagggagatcttctcccccatcattttacttctggacttcctcctggaatcttctgggggaaaaaaatgatggtgagaagaatgggtcatggaaacctctacgaaattcacagcagagacttactgggcacccactgtgtgccacgcactggacagtgagccagacagtcacagcccagctggcagagtgcctgcgattccagtgccaggtgccagccctggccagggagggagttgcacgctgtcaacacggatttcccagacagaagcaaatgagagcacgcagggctcaggacagaggagctgtgtgctaagagcacagtcgtagagtccaacacactttggttctttgccagccggacaactttgtccactttattgaacctcccttggtctcagtgtcttcagccgtaaagtggaatagataatccttcccaagcagggttgtggtaagagtggatggggtgatctatgtgattgtgtgctgcttgtaagccctgagaactgaaatcagccattaccgtgcaccaactaggaggtgtgccggttggtggtagctttattctgttctatcacgcaggggccagtcacagagggagcaaagtttatcattcatgatgggcgcttttgaggcggcagtggcaggttgataggattagcacatgggaggtatccaagtttgctaagtggttaatgattgcgaacatttattgaagacagatgctcaataggtaccaggctctgttctaaacgctttacctggataatctcattccatcctcacagcaaccctggcagtagacactattatcatcccctctttacagatggagaaactgaggcccagagaggttaagtgaattgctcaaaatccctgagctagaaccaggattcaaacccaggctttctgactccagaacgtttcccgcttcactaactggcgatctcgttcttatactgcccctgttctctgtctccctgtccccagctttgccctgagtgaaggtgaaattattgccatccactcatatattcattcaatatggatcagacttcttatgtgccagccttggtttctgaatcataacaaatgcccagtgaatatttgtggaataaacgcatacattaatgaatgtccccacacgtaccaccatcagcagcacctcctcaggcccccaaacagacatggtcctgggtagcgggccctgtgatggaaaacaaacatgggctgaggaagcacaaagaaggaacatggaccctgccaggagaggggagagccagggagggtcttagtatgagccatgcttcatctgaaatttacatggtggattgggatttgttacaaggagaagcaggacagacaccctcgagggatgaacatgagaaatgggtgaagactgcaggtggttcaggctaggaggaggcaggaacgggaggaggtgacactgaggcggggctgtgaggagactgcactgtgcgggtcagaaagacccttcaggcagggtgaggaggagggcagatgggaaggggcaaggctggaggcaagtaacgttggcaagagatgaggggaacatgacttatggctgagccagtgtgggccgagaggacacagaagcatccagacttggtattcagtttgagtgagtgggccaggggctatagaatgaccttctcatgactttctctttgggtatcttaaatccaggacacaaatgatatcacatatgcagacctgaacctgcccaaggggaagaagcctgctccccaggctgcggagcccaacaaccacacggagtatgccagcattcagaccagcccgcagcccgcgtcggaggacaccctcacctatgctgacctggacatggtccacctcaaccggacccccaagcagccggcccccaagcctgagccgtccttctcagagtacgccagcgtccaggtcccgaggaagtgaatgggaccgtggtttgctctagcacccatctctacgcgctttcttgtcccacagggagccgccgtgatgagcacagccaacccagttcccggagggctggggcggtgcaggctctgggacccaggggccagggtggctcttctctccccacccctccttggctctccagcacttcctgggcagccacggccccctccccccacattgccacatacctggaggctgacgttgccaaaccagccagggaaccaacctgggaagtggccagaactgcctggggtccaagaactcttgtgcctccgtccatcaccatgtgggttttgaagaccctcgactgcctccccgatgctccgaagcctgatcttccagggtggggaggagaaaatcccacctcccctgacctccaccacctccaccaccaccaccaccaccaccaccaccactaccaccaccacccaactggggctagagtggggaagatttcccctttagatcaaactgccccttccatggaaaagctggaaaaaaactctggaacccatatccaggcttggtgaggttgctgccaacagtcctggcctcccccatccctaggctaaagagccatgagtcctggaggaggagaggacccctcccaaaggactggagacaaaaccctctgcttccttgggtccctccaagactccctggggcccaactgtgttgctccacccggacccatctctcccttctagacctgagcttgcccctccagctagcactaagcaacatctcgctgtggacgcctgtaaattactgagaaatgtgaaacgtgcaatcttgaaactgaggtgttagaaaacttgatctgtggtgttttgttttgttttttttcttaaaacaacagcaacgtgatcttggctgtctgtcatgtgttgaagtccatggttgggtcttgtgaagtctgaggtttaacagtttgttgtcctggagggattttcttacagcgaagacttgagttcctccaagtcccagaaccccaagaatgggcaagaaggatcaggtcagccactccctggagacacagccttctggctgggactgacttggccatgttctcagctgagccacgcggctggtagtgcagccttctgtgaccccgctgtggtaagtccagcctgcccagggctgctgagggctgcctcttgacagtgcagtcttatcgagacccaatgcctcagtctgctcatccgtaaagtggggatagtgaagatgacacccctccccaccacctctcataagcactttaggaacacacagagggtagggatagtggccctggccgtctatcctacccctttagtgaccgcccccatcccggctttctgagctgatccttgaagaagaaatcttccatttctgctctcaaaccctactgggatcaaactggaataaattgaagacagccagggggatggtgcagctgtgaagctcgggctgattccccctctgtcccagaaggttggccagagggtgtgacccagttaccctttaacccccacccttccagtcgggtgtgagggcctgaccgggcccagggcaagcagatgtcgcaagccctatttattcagtcttcactataactcttagagttgagacgctaatgttcatgactcctggccttgggatgcccaagggatttctggctcaggctgtaaaagtagctgagccatcctgcccattcctggaggtcctacaggtgaaactgcaggagctcagcatagacccagctctctgggggatggtcacctggtgatttcaatgatggcatccaggaattagctgagccaacagaccatgtggacagctttggccagagctcccgtgtggcatctgggagccacagtgacccagccacctggctcaggctagttccaaattccaaaagattggcttgtaaaccttcgtctccctctcttttacccagagacagcacatacgtgtgcacacgcatgcacacacacattcagtattttaaaagaatgttttcttggtgccattttcattttattttattttttaattcttggagggggaaataagggaataaggccaaggaagatgtatagctttagctttagcctggcaacctggagaatccacataccttgtgtattgaaccccaggaaaaggaagaggtcgaaccaaccctgcggaaggagcatggtttcaggagtttattttaagactgctgggaaggaaacaggccccattttgtatatagttgcaacttaaactttttggcttgcaaaatatttttgtaataaagatttctgggtaataatgagtccttccggtgttcagtattcttgtctttgtgagtgcgtcccggggccgcctcggggcctgcctgccctcctgccaaagcctggaagaggattgaatggaccccagggtttggaaacaacctacagcatttgagcccctcacgtaggttttagagacgtacaatttttgtttgccctggctcagaaggagccggtgtaaggttgagataaaattccatatagacaactgagtttggatctcggctctgctgctttgtagctgtgggagttcaaacagcacctctttgagacttgggccccgcgtcggcacaatggggcaggaatagtccctgccagggtgactgtgtggattcaaggaggttggaagcactgagcccacgcttggcactgggtaggccatcactgaggcttgtgtctttccttcctgccctgaccctgcatagctgagtctcgtggcctctcaccactgatgggatctcggacacccggctcaccctcctcctggggcctcactttccttccccaccaaatgcagacatctaatgcttgtcctgtaatatccttgccagatgactgatgtcaagtgctggtttatagtgggtgctcaataaatgttagtttcctttctatccctccattagatcattaatgatattagtgctaattatgtaataaagttaaggcataaatatgttaatatttagtggttactatgtgtcaacgctttaccttgatgaattcttaaaccttgtgactcaagggcaattatgttactgactgtagatgacacagagagagggtgcaacttacacaggttcacacagctaatgagtgatgttactgagcctccagttccaactggataactgtagtgcctgatgcttagccactgggttaataatcaatacgtcatgtatggaccactgactgcaaaattaaccaccatgatagctaataacagctatgccaagtgtgctgccgcgtgcttcacagttagaactcatttccttctcccagctacatgagggaggaactcttgttctctgtgctttgcagataaggaaactgagacacggagaagtcatttctccaatgtcccatggcagagcagtttgaagccagggaatctgactcttctcccccacactgtacttactgcctcatttaattctcatgactatcagatcgctgtggttgtgcccattttgcaaagaaggaaagatgaggttctggaagtgcatgtgacatgaccaatctcacgcagagtctttagtcaagttgagacttgaactcagatccacaagcccactggggatcatccctacacccttggcctggtccatgtgatcagagaccacctgaaccaaggagccttctgcggggctcagagaggtcaccctcctctcaggccaggaccttggctgtaacagacagctcagcagtttcctggcccgtggcctgagttcagctctccgcctccctccgggagcaacccatgaaatatgtgcactgcttgcaggaatggggtgttcaaggcatgaatccaggccgagtgggtggggaaatgccttccattctctgggaaggtgggggatgatggactgcgtgtccagacaaggagacttggtgggtgtatttcatgcagcacctgggccttgcttctccacggccaaatctccagggctggaggctggcaggcgaaatgaaagttgatgggagctaagtggcccttttccagccctccaggaaatcagtcaagcatttggcatttatcggacacctccttggggttcctcctggtgcaaaggagaatgctaagactcccttcctccatgaggaccaggccagagtcctctgccttccacctgaagcccctgcccattttacgtgataatcaggaaaatctccactggcccccaaccccaagatttgaatgcccaactgtaaaagcccatgtgtcttctagcacatttccaacagccaagttttgacgaaggtttatttaattttggcataaacacatactacatattagacactctcctaaactctggacaagtatttattaaaattaattcactttattctcttaacaaacctatgagttaggtactatgattatcccccacttaataaagaaatggaaacacagagagattaagcattttgctccaaggtcgccatccgggaagtgacgccactgtgggtatggtctagtccagcactgaatgggcatatgatgggggctggggctgatagtgagaaagtggggggcatagataatgttcaggatacactggacactgtcagtagccagaaacaccacatctcaccaccaaagtgtcagaacatcagggtgatatggctgcctggctgctcaccagccagccgaggcacccttgagcctgccactgctgggatccccgacaccaccccgcttcaccaccctcttcactgtgcctgaccaggctcttggtttcttttctgaatacaagattatgacattgaagatgctttttaagaagacgtgctcctgatgttcaaaaacaggcaaaaccttggcaacagagatcagaagagtggctgcccttggagggaggaccaggagaagcctggggtggcacatgctctacgtcttcctgagtcgtggttatctgggaggttgcatatgtaaaaacctttccagctgcacatttaagatgggtgcatttccctgtatataagttatgccttgaattttttaaaagatagatgcccagccctgtccccctcaacctttgatgcctgcccctccccacccccggccaatctattttttaaagttagtgtcaacaccttatcttcggtagctgaacccagcccagggcctggccccagtgaggggcccaaggagtgtcgctgagttcattggaaagatgaacatccccgtgatcaaaacagcacagaaaacagtgaaagatgctaaacagcacaaagattaaggatggctacaagcataagccattatctgttatcacttcatctcctgagattccttccatcacttttcctcctcctccacccattggaatcggatacaactgcaccccagagtccttgccctgtgaccttgggcaaagagattcaccactgggcctctgctttgtcacctgtgaaacagggatagtagcagccttcacctccgggggttcttgcgagagttcgatgagaaagtagatttaagactctttgcagcagtgtggtgcagacagcagtcgacatatgcacagaaacacacacacattcacacccacacactcacatatcaggccaggttattagagcatcgctgcaatggtgggtcttctgacgaataattttatcaagtccctctctttctcattagcctgagataggtctctcttaccaacctttcgggtatggggtgcaacaccccagcttggttttcggagtcctctgccttataccaccacctgacctgtttaagaacatttcctgctcctccccagcccctgctggactccttggccaggttgattttcctctcccaagaaatactatatagcaactcctttgacttccctagccccaccatgagtcattcctccagtgacttggtgtcctcttgaccagacatgagctcccaaaccagaacttcacgctctacctttgggattcagcccctaggataagggagactaaagcctaccatgtgccacgctggactctggacactcgaattctttacttcatggaaccttcacattctttacaaatggaatgtcaatttcacagggaagaaaattgaggctcagagaggtggagaggtaataagttcaagatctttcaactagtaattatttctcaagctcctactggaacctggccctgtgcaaagttctgaggacacaatgtggacaaaaaatggaccacacccatatgagctcatatatgagggaaccagagccactggcaatcccagtgcagggatgagcgctgctgagaagggcgtgacaaacatgacgtacaagtgcagaattaacacactaatgagtgagccagcagtggggcaagagctggttccaagagtaaatgggcacttagaggctttgaaaaaggaaggtgagaataacattttcaagttagagatcaatccggttaatgtcccacaaggcaataaggccatatctttggagatattttttttctgccagacagaagccatttgcacccaccagacaaaagtctacaaattagccccaatctgggccttaatcaaataggaaagacaaactcaggtatattcttctacagaactaactaatccttcagtggggcttttaaaccgtgccccagtatggcaacgagatgaagcactgccttcttttgccttatttccaaatttgagatactttgtcttattaaaggaaagtatactggcttcattcagcctgcacagggcagaaaaagacttcttgaagaggaaatccctgaactgagatctaaaaaataagtaacaagaagccaggtaagtgcaaaagagccagtgcaaaggagttccaaggagccagtgcctggcagaggccagccgtccctgtgtgcactggcccctactgagctctgcagcccgattcacaccactctctccatcactccctgcactggcaacaccagcctcctgccagtttctaaaatgaaccacaggaccccggcatgagctactccctctgcctgcaacactccctggatctttcctgcttgtcctccaatccagaggctgggctaagttcccttgtcaaacacttccatagtaaccatgtccagcccttctttgtagccctcatctcaatttgtaattatacattggcactgtgattacatgattaccatcctctcctctactgccccagttgctgcctcagggcaaggagggtgttgattcactcatcagtgtaactcctatgctaagcccataggaggcacccagcaaatattagagggatgggaggatggacggagtgatgagaaggaggatgagaggatagatggatggaagaagggaggctgaatggatggctggattgatgcaggagagcacggatgggtggatgggtgggaaggaagaaaggaagggggagagggagggaagagagcaaagggggagaaggaagagcataaaagtcggagtctgcttggcattttaggagaactgagagtccctggctggcaggtttggaactagaagcaaacctcagtacatctgacttttcccactgagtttctctgcctttcatcatgatcctgggttcagggcaatcacttttttaaaaaaatgacgcatgatccccaacaggcaaggagccaatgacctttgtctgagcctttggttcctcttctagagaaactggggctatacttagaaaacaggataaaagattgcaaaaatttgtctactctcaaattgcacaaccctagcgtggctggtcaatggctcaactttgggagctggcggggctcagcctctcaacagacttgtcctcctggctctgcttcaatgacaacaggccaagccctcatggtagaaggtgccgttcccaccaacctgggccttctgcccccgcaggccctctctgggcaaggtcagctggtgcggcagccggtcgcatggatctgggccacagacctgtctccagaatgaggccgggtgagagtttaatggcaagaaggctgcagcctgactaaggctgtcggcttgattctgccatggctcccccccatgccagtaaatggaccctgtgcacatgcagattaatgcattatcgctaatgttttgtgccagatgcaaaggcactcgggcagcccggccgagagctgccattaccacaggaccttttgctggaaaatttttcttggggcaattaaatcttcagctgtctcctccaagggagtgccagcttgcattttaattatcctcaaaagagggaagtaggggaaaggacacaaggcaaagaatgaaaaaataacaacctgctttataaacacagtggtttctcccccatcaactccacagtgcccttgacctttagattcctgcctcccgatacccttggaaggacccctttaacgggaagaagggagaggaggtaggagagagcgtttcttgagtgtggaataagtgttagtgcaatgcattatgcctggttaattttttttaaattttttttgtagagacagggtttccctatgtggcccaggctggtctcaaactcctgggctcaagtgatcttcctgcctcagcctgcaagtagctggaactacaggtgcatgccaaccagcccagctaattttttaaaaaaatttttgtagagactgggtctccctacgttgcccaggctggtctcaaattcctgggctcaagtgatcctcctgcttcagtctcccaaagtgctgggattagaggcgtgaaccaccattcccagactcatggaaagttcgagaaccggcaaaactcatcagtcaggtgctagggcgagggaagcacttgactaaaagggacaaagggaactttcggggacctggaaatgcttatcttgattgaggtggtgcttacatgggtgtacatatcagtcaaaactcatcaaactgtatactttaaaatgagtgcattttattgtttgtaagttaatactttaataaagttgattttaaaataataataaaataatacgagttaatatttatctagaccttactatgtgccgtcctagtcgcgcttcgtatgtgttaagccctttatccctcactccaatctgtgacataggcactcagtaccccgttgcccaaatgaggaaattgaaacacagagaagtttggcaactttctaaagtgacgcagctagtaagaggcagggcctgggttcaaatggaggcagattttaagcctatagctgaacagcgaagtccaagattacccaactggttattactagaggcaggattaaaccccggtgcctttccaacgtgatgaaaccggtggaagaggaaaacgcattcattcactagggaaacatttactcatcctccgctgcaggtcgaactgtagacacagagagcaacagacaaatcccaggccctcgtcggggaagaaagggatcatgaaataaacagaaaaataaatgcgaaatgcggccagcgatgaaagctcagaaggcgagcttaccccggacccaaacgcgcaatactaaccgggagtgtaaggaggccacgccctcctcgcgtatttgtgcccaaatgagctgcctccccagcgtgcaccaaattcctgagccacctgctccgagctcgatttccctttcaagctgtgtgttctgcgggggcagggagagctgcaagggctcatctttcaggacgtgctgcaaaggccctttgaagtcatccgccctgctcttggcaccttgcgcctggagctgagctcttccaaaaatgacccctgcgcattccgtggtgcggccgcccagcccaggcagtcgcggtccagagcaggggaagctgcagcgcggccgacagctgggagagccgaggccctgagggaggaccctgcctcaagccaagcaaccaggccctgcggccctctccccacccctgtgcggccctggcgcagggaaccgggacggggctttcaggccttgaagggcagacttactccaccaaacattcccatcgtcggctgatggagggcctcgagctgggcgctgtgggtacgttatcctatttacttctctcggtagccctgcaccatcgcctctggttcccaggtaagcacagagaagcagatgacttgcccaagatcacacagtactgcaggaatagaattggcgtctggacctctcccctaataccccacggcctccagaatctcacctcagcccctgtccatcccgaaataaacactctacaccatttagtgaatgttctttcagaggtcagaccctatacattcatttcctggctcccccatttcctgactgcgtgaccttaagcaagtttcttaacctctctgtgtcagcgtcctcctctgtagaatggtgccaaaaactgtacctatcccagaaggttactgtgaggaccaaatgagacaagacaataaatgtaaaagtggttaaaactgtgcccagatgatagtgagccctcaaaaactagtcactcttctaattccatagacttgattaatttctggtttttcataagtggatttacatgtatacatttaaggcacctttccaagtaagacatacaggtctacctcattctttcaagcagcttcataacattcttgtattcattcattcattcattcattcattcaccaaacatgtgtagagcgggcagctcctgtacaccaggcaagggcatacaacacactcagtccttgctctgagttctcatgggagggataattgacaaatgcatgaataaatagttgagagcatttcaccttatactgagtgctatgaagaaaataagatggggccaggctctgtggctcatgcctgaaatcctaggactttgggaggccgaggcgggcagatcatttgaggccaggcattcaagaccagcctagggttttagtagagaaaatccatctgtactaaaaatacaaaaaaacaaaacaaaacaaaaatgctctatgtggtggtgcatgcctgtaatcccatctattctggaggctgaggcaccaggattatttaaatctgggaggcagagtttgcagtgagccgagatctcaccaccacactccagcctgggtgacagagtgagactctgtctcaaaaaacaaaaaaaaaaaaagaaaaaagaaaaaagtaaaaagaaaagatggacaaagtgttagagagacgctggttgggagagggaaaacaatttacagacagtgcgtgaagtccccagggatatggcattttactgccaccggaaggaagagaaggaaggagaatggagcagtccaggcagaggaagcagccagggcaaaggctgggaggctgcactaagctcaagtgtgattcaactggaggtaaagaatgagcatttttgaaaccaggttggagagtcaggccagggcccagtgagacagcgcctgtggattttagcctgagagacatgtgaagtccctgaacccgggggtcctgcagctgtgtaggaacagattggagaggcaccaatggaggaaccaggaagtttgtcaggctacaggattcagaggcacgggcaagaggcgatggtggcagggactagggatgcagcctccagcctggaacatgcctcagtggcagagcccacgggaccagctgatggggaagacagagttgaaggaaaaaaagaaacaagttgccactgacagatgtcaacataataatttaattaatgaattccctattgatggagagctggactgtttctattttttccctacttgcaaacaattttgtcttaaacattattgcatagatagccccagatatgagatgcttggatcaaaggggtgaactttttttttttttaatcatatccagatggccacattgcctccattccacttgtgtccaacatgcaggagttccagtttctaccctggaactttctcctcctgctgtgctcctgggaacactctgcccaacccctccacctctggcacagacccggtctccaatgcatttgtatttcttgctgcaatctggaattataagttgttaagaagaaaacctcagaaccaggctaagtggctaaaaagactgcccaggggcctctttttccagcaggaggcagagagaggcttccaacaccctgaagagggccagtttacccctattcttccaaatacaaggaattgacttttatttttttttccctcttcaggcctgaaaacaagccagagcattgaatggccatgaaaacaagcagtgaaaacaggccctgaggttacaggaaacccttctccccaccactctctgagcagcgggaaggaagggagccactgtcctctgggtcctctgcccttcagccctcctggaggcccactggccttccccatctcacatgtgatcaatgccccctggttgtggccaccacctgctgcctgacccccattccatgccagcttttgctaccagagtttccttttcataagtggcctttttaaaggaagtattttcttttaatcagcagtcactgcatctgtaacagtgctgaagcagaattttgttattttcccattacttagcgcttctctgttccatttatttgggggaagaatcgctaagatttcagagattcgtagctctcttgtacgcggtatctgattttcactttggcatttggagatgcttttgaaggtggtttatgttatctttccaagacttacctggtgagttacttaatcaagagaggattttgaaacatactgcctcttaatatcttgtcttttgtttttgttttgtttttttgagacagagtctcactctgtcgcccaggctggagtccagtggcatgatcttggctcacagcaacctctgcctccccagatcaagcaattctcccacctcagcctcctaagtagctgggatcacaggcacacaccagcacacctggctaatctttgtatttttagtagagacagggtttcgccatgttggccaggctggtctcgaactcctgacctcaggtgatccacccaccttggtgtcccaaagtgctgggattacaggcgtgagtcaccgtacccagcctatcttgtcttttaaaacaagtgactttttttttacagcaaaataaatggatagcaactctttgacactgctagtaactattattaattgactgcttaggaaatgtcagctgccaggctgggctcattcccattggatcttctccgcagctctctaagggaggtgtgagtttttgtatacatttaatgtgtgaggacaccaaggtatggagaagttgactactatcagtaacttacccaaagttacagaccagggcagaaatgaggtgcagattccatactccccagggcccttcctttgtaaccatggttacaaagcctctcagagggaaggcggcggattctcctgcaggtcactgtggcagtgacatgggcaggggtggcggacagacacatgttcccgtttgttcttactcttgtccgtggcacctcttccttccgactgctggtccagccgatccatgggccttgcaagtccacactagaggcagaatcccttgttctagatgactcctaaaggctcagcatctctaattctctgatgggatgctgactaaggcacaggggtttcaattctatttgggaagtgacctgttcccctccatctagactagacagatttaacaaataaaaatagaggacccccaatcacatttgaatttcataaaaataatgaatacttttagtatatatcatgcaatatttgagatataaaaatcacttgctgtttgtccaaagttcaactgtaactgggcatagatatcctgtattttctctgtcaaccctctctccgtcccccagtagatgcccttctagagagacctgccagactgagccgcttccgtcagccagacatgaggataagagcgtttaggtaagtgcttggtcagcatggaagagccttggggaactgagtggggtgggacaggctgaggagccttacggggccttggtttccctgtcttggctacagtgtggagctcggacatccccaaggagcccaccgtccacacattgacggtcgctgcttttaacataaagtccagctcccctagtgaggcactgaaaggccctgtctgccaccccacctcgcctcctgcccagctcacacagccacctggaaggacttaagagtccctcccaaaacaatctcttctcacctgtaccttcactcttcttgcctgccttccttgtgtgctgtttaaactcctattcaccctttatgcctttaatgccacctcctcccagaagccttccctgaccactgcaggaagagaggcagttgcattcacttccctgtcactttgggcctctttgacagtttgattacaataaaattacagcttatgcaagtttaacgtgtgcttcagacaaaagaaaaaagaaaaaatacagaaagaaagacaagaagagagaaagaaattaagtaaggaccatgtggctcaatgggcacacaccctaagtggttatgagatagaggcagaatctgctctctgaggctcagtccccataggcccctcatcctacagctacctaaggacaagtctttaaagataagctggaaaaaaacccaaaaaactggcagtatagtgggaaagaatgagggacttggcagaccagactactccaaattcagactccagctccgccacttcctggctgtacaaccccgagcaagttgctaactcctctgtgcctgggactcctcacctgtaaagtgggcataagaaaagtaccaacctcataaggttgttgagaggataaaatgagcttaacacctgtgaagtcctcacagtagctcctaatccacactggcactagattatattatggtccagtattaccccagccagtaccctctgtggaaggaagaggaacctgctcctgggctgcagggaaccccaactgtgctggactcactaggagactgaatatcagtccccaacctagtgtctctgaggatttgccaggggtacttttcatgacacttgatttttgctttccaagctgactcgactgggtagcaccctcagagaaatctaaccgtcagatagacagtcctgggtgaaaattcccacccaccatttctataatagttgtgtgaccttaagcgagtcacattttgtgttagctctgctcgcttcacctgtcaaatggagacgatgatacctacccccagggcatgaggagttaacacctgtgctgatgcctgctacctggtagacacctgataccaaggccgctgtgattaatttactctttccacagcagctgttgttacactgtttcattttcagtttacatgctcttcaccccacagcctgggagccctcaaagatggggactcgttccaagtcagctcaggctcccatggtcaagtctacaccaaaaaccagggaggcactcaaatatgagagggggatggagggagggagggaggaaggaaaggaaggaaggaaggaaggaaggaaggaaggaaggaaggaaggaaggaaggaaggaaggaaaagaagaaggaagggagggagggagagagagaaggaggaaggaataagaggggaaggaaggaagggagggagggaggaaggaaggaaaagagagagggagggaaggaggaaggaaggaagagagggagggaggaaggaaggaataagcaattaaattcttcattctcaggctccgggcttatctgactggtcagaggaatggatcagtagcccccattcattctcctctttctggagtcacaacttaggtttgtagctgtctaatttattattatatggtgcagtgcagggtaattatacactgtggtataatttgttataacttgggctgaggcctataactgtataatttattattatacagtacagtgttgaataatacgaagagtatataatttatttcaggcttacgagcctaacctgtaatccaaatgcagcatgcagcctatgcagatgagttaatgtttctacggaaacctcaacttagatatttcttcatctctagttcctttctttgggcttctcagaacacctgtgttaccaagttcctggtactttttgtttggtgcaagactgacatgttgggtagccctggcccaggctgaaccggtcttgcatattgggtcatgggaaagaagggtccagagctgtcaccctgcccagtgacagttgtcatcacagggaggccgcagcttgccaaaggtattactggcagcagatacagaaccatgaccagaacccccatttctgggtccccaggaatgaggaggcttgccgcacctccatctatttattagataactattctttgctccgttctcagcactggaaacacatcatgggaccaggcccctcgtgaagcttgcattctggagattaagagcctccgtctctctggtctcttgtttcttaaagtgtggactctagaccagcatcttcagcatcctctgggagctggttgggagtgcagcatcttagccgcaagcctcactgagtctgcattttctttttttttctttctttttttttttttttttttttttttgagagggagtctcgctctgtcgcccaggctggagtgcagtggcgcgatctcggctcaccgcaagctccgactcctgggttcatgccattctcctgcctcagcctcccgagtagctgggactacaggcgcccaccaccacgcccggctgatttttttgtatttttagtagagacggggtttcaccgtggtctcgatctcctgacctcgtgatccgcccgcctcggcctcccaaagtgctgggatcacaggcgtgagcctccgcacccggccaagtctgcattttcacaagaccccctggtgattcattcacactgaagaagaactgctggagttgctgtatgatttaggggaaccattttcttctctacttcccttctacccaaaatatataccatctcactgagtattgaagcggagttccttttttttttttttttttttgagacagagcctcactgtgtctcccaggggagtgcagtggtgcaatctcagctcactgtagtttccacctccctggttcaagcgatcctcccacctcagccttccaagtagctgggattacaagcctgtgccaccacacctggctaaattttgtatttttaatagagatggggtttcaccatgttggccaggctggtcttgaacccctgacctcaagtgattcacccaccttggcctcccaaaaagtgctgggataacaggcgtgagcctctgtgcctggccccttcttcttttttttttttttttaaagaacatgtatttttttcttttactttggatgcagaagttcattatgtaccttttggaattataaaacaaaaaaatatatataaaaaaatcacccagaaccccaccattcagaagtgacactgttaatattttaatgaccaatccatcagacttttttatacatacatatactttctttttacaaaatttcgagaaaagatgcaatagtgttgtattcaggctcagaaaataataccccagaatctggcgctttgacgtgctgaactgaagaagcggtttcaaggtctctttctgaccttgccctgcctccctgtctctctgatcctcttactttcccaaagcaccaggaggggctgtcgctggaattttcttatctgcctaagaaagcttctttccaagagaaatgcaatttcttaaaactccccgtccctaggaatctcatcaaataaccaggaaagattaaccactggaaaagagactagatgtagtcaccgtgctcagacagactttcatttgtttttctgagagcagctcctagagatcacctgggacgcttcatctgcatagtaagacaatctttgtttacagtgaaggtctgccccttaccttcccgccacctcccccagagctcagaagaattttgtctcaggcagttgttctttaggatcactcatttcccctaaaaagtcacttactcctatacctcccatttccccttccccgatgaagaagggcatataagggttattgggtaatcattctcctataattcccctgtgttactcacattaaataatttattttattattattattattttttgagaggcaagatgttcttctgttgcctgggctggagtgcagtggcacaatcatagctcaactgcagcctcaaactcctgggttcaagtgatcctcctgcctctgattaccaagtagctgggactgtggacacatatcaccatgcctggctaattttttaaaaaaattttttgtagagacaggatcttgttttgttacccagggtagtctcaaacttccggcttcaagtgatcctctcaccatggcctcccaaagtgtggaattacaggcatgagccaccatgcctggccttgttaaatacaatttcatatgcctttttcttttactaatctgtctattatagttcgttttcagcaaaccttaagaggacagaggagaagcttcccttcggcccttacaattgcacagtggctctcaaaactgagcatacattcacctggaagggttgctcaaacatagattgctgggccccacccccagagcttttgatcaggaggtctgggaccaggcctgggatttggcacttctaacaagttccaggtgatgtggggctgctggtccagggaccacaccttgggaagcactggactcagtgttctaagatttcctgagcaccagtagttggaatccagctctgccacccactacctgcccacagggaagttaggctgcctctccatgatgcaacttctgagtccacaaggacagtacctgcctcataagattattattattataaggattatatgagttaattagtaaagcacacaagaagtattaattatgatgaatatgcatataattgtttaatcaagatttcttaacaattgttcaaaaacatttttcaagtcattattcttcaatgtatttgctttcaaaggctgtgggcttatccttcatagtgatgtatttatctagtccacagtcttcaactaaacagtgctgcaatgagcattctcatggataaatcacagtgcacctgtctgcttatttccttaggatataatgtgctaaatgtgaaattgctgagaaaaattacatgagcatatttaaaacttttgatatgttttgctaaatggccttccagaaaaattatactgatttataatgctaccagcagtatatgaggtcatcttttccttatattcttattaatatcccatgttattggttttttaaaattatgccaatactttgtttgttaatttgaatttctttgatgactactgaagttggatgtcccagcttcaatatctcaggactttaaatattttttaaaatccctcaaagcttgtgtttacagaatgttaaccagcccttttctcctcaatgaatgaactctgtgtcttggcaggtctcttgtagtagcagaggcatcatctcacaggtagcagctgcttgatttaaatcccacctgtgctgctggtaacatacctcccatttaatagatgggtgtggactagaggaggatgaaacattaagagagcaaacagaaggagagaagttatttgttccacaaaaattctctcaacatctcttacaggtcaggccctctgctaaacttagaggatgcaaagacaaggaagtctcaaagtgcagggtggtggggtgggagaatacacacaaaataatgtgaaatataacagtgcaaatgaaaacaatggggtaggaatctaatgaaggaaatgatggtatctttgaagtcagagaggacctgggttcaaatcctgtttctttcaactcctagctttggacagtaatatgcaaagactatttttaggcttaaactagttaaaatgacaggtaaaaaatacctggaaacaagtaaagtttcctgtttccaggattctcacaattgcagcccaagggccaaatatggcatatagaaggtcttgtttggtgcatccagtatttttgaaaaaaaaatttagtagaggaattaggatggcttagaccaatagatcctggttgcccaacttaaacccctggaaatatatttgttcctctagaagagatctgggttcattcactgacttctccttctggtcaaggtggaataacagagaatgggtttatcctcttagctgaaacaaaaaaatctggggaaaacatatgaatcaacagttttcaagacattggacatcaggcaacacagaaccgtgatccctgagagagagaaaacaaaagagagcctagcaattgcctctgcttactatctggagagagttttcaggccacggcacaggacagggagtccaggtagggcccgggggtcttcctgagttgaagagatggagctgggtggctgctatggttagaatgtttttgtcccctgtaaaaaattatgttgaggctggatacagtggctcacgcccttaatcccaacactttgggaggccaaggcaggaggattgcttgaggccaggcgttcaaaataagcctgtacaacatagtgagaccccatctctacaaaataaaatttttttaaatagccaggcatggtgatgcacacctgtagtcccagctactcaggaggctgaggtgggaggaacacttgagtctaggagactaaggctgcaatgaggcatggttataccgctgcactccagcctggttaacagagcaaaaccctatctccaaaaaaaaaaaaaaattaaatttatgttgaaacctaacccctaatgcaatagtgttgggagatggggccttttggaaggtgtttagtcatgaggactctgccctcatgaatggattaatgttgttataaaagggcttcatgaaggtagtctatccttttgcccttctgccctctgccatataaggacatggcatttctcccctctggaggacacagcattgaaggcgtcatcttggaagcagagaacagctctcactagacatccaacactggcatcttgatcttgaacttcccagcctctagaaccatgagaaataaatttctgttctttataaattacccagacttgggtatttttgttgtagcaatgcaaacgcattaatccagaggccaaggtgtctggagttcacagggcagagtatcactgagaagagagcttgtggggaggagcaggttcaagagcacaggtgacctctggcgatcagcagagagcccctcctgtcttctgagtactaatgagcatgtgcatgtatgaaacctacctgaggagcaaagaaccacctgattagattagagggaacaaccccaggttcccccacagggctgggaatagtctctgttcttaggagccagagtgaaaaatctcacagggctttaggcagaggattcacaaggtttcttccttagtagctggacaaaatttgctctaaacatggatatggttccatctaaaaatgtttaaaagcaaagattaaactaattccaaggaacttgactgtgtcccagaaaaaaaaaaatcaaacatatttatagaaacacacacaaaaaaacctagcacatgatgatgtaaattcagtgtctggtatccattaaaaaaattgccaggcatgcaaagaagcaaggaaattcaatccattaatgaggagaaaatttgatcattggaaactgacccggaaatgacacaaatgatagaactgataaataaagacattaaaaccatgattatagctgtatttcataggttcaggaaactagaggaaggactgagttactaaattgtgatatggaagacagcaaaaaggctcgtataaaaaagattagtgaaattaaatatatagcaagagaaactatccagaatgaaccatagagaaaaaaaagactgaaaaaaaaaaatgaacagagtatcagcaaaatgtgggacaacttccagtataatatacatatacacacaacacacaacacacacaccctcacacataggtatgtgtataagcagatagacatatttataagcagataaatatatacatatgtgtatatatgtgtgtgtatatatagatcaaatatatatatatatatatatgagagagcttgaaggagaaataatggttgaaaatttgccaaatttgatgtaaacaaaattcacagactgaagaaacccagtgaaccccaagcacattaattcatcacagtctctaccttctacttccgactgatattataccactttgccttacgagattatacttgagactctcacaacattaagcaaatgacaccaagggccattataatcaaattactcaaaactagacataaactaaaaaccttaaaggcagccagaaaataaaaaacccaggttatatatacacatgaacaaatataaggccggcatcagatttctcaaaagaaacaatgcaagtaagaagacagtagagtagcatccttaaaatgctcagagaaaaataaagtcaacctagaattctacatccagcaaacatgtctttttaaaaatgaaagcctgggcaacgtggcaaaaccccatctctacaaaaaacacacacacacacaaattagccgggcatggtgacacatgcctgtagtcccaactactcaggggctgagatgggagaatcacctgagcctggggagatcaaggctgtagtgagccaagatcatgccactgcattccagcctgagtgacagaatgagaacctgtctcaaaaaaaaaaaaaaaaaaaaaatcaaactaaagatgttttcagatatccaaaggcaggaagaattcatcaccagcatacctgtatagaaaaaaagtgttgataagtcctttaggcaaaaaaaaaaaaaaaaaaagataccagatgggagtctgactctacacaaaggaatgaagagcactggaaatgacaactatgggcaaataaaacccctcttttctcttactttaaaaatcactttaaaaacaaatttgactatttaaagcaaaaataacaacagtgtactgtggagtttataatatatgaagcaatactatgtataacaaaaacaatacaaaggccaacaggggagaaatgggagtataatgttgtaaggttctgattctgtatgtgaagtggtataatatcatctgaaagcagactgtgataggttagagatgtgtattataaactccaaaacaactgctaaaataattcaacaaagaattatagctaataagccaacaaaagagataaaatggaatcataaaaaatattaatctaaaaaagaagcagaacaaaaaagaaacaaataacaaatgggggaaacagaaaataaatagcaacatggtggatttaaacccaaccatatcaattatcaccttaaatgtaaatggtctaaacacccaaattaaagaggcagaaattatcggattggaacttgccgaggtcatctcctagacagaggtgggggtgggcagccctggcagctgtgctctagcatctcattttgttgcctcttagacatgtggtcccttctctgtgggccaaaatggaagtcaggacgctttatgccaggagtagagagtggagacttcccaacatgtactatggaatgtcaatgcacagcagcactgaattaatctcagacagcagctgctagcacctctgaatgagtcttcattcaccaccaccttctccccgagatcactggctctgattccggagttcacctgactaccataatcctagcagctgggtaacctctgggcggcccatcccaccctcaggacagtgatctgccagccagcattacagacaggatctccctgtcaagacaaatgcttggaaaccagccctaaatgccaagcaaccagattgttttccccacttgatgtcatgtgagactttgtccaatgtctgcagagcttctcccatggcaggataagcggccaggctggacacacaatctcagaggacccagacatccatagagatatttcgttcattcattcatttgtccatagaatgcttattgagtgagtaccttctgtgtgtcaggcactgttttagacactgagaaagcagtgaagactgtgaaaaggcttgtgtctcccaggggcttgcggtctagtgaagggagacagacagatatgcaatgaaatatgatgactggtaaaatagcaatcctgacaaggtctgatggatgcacccaaccaggtttggaaggatgagcaagagtcttctcgggggacaaggcagggaaggccaccacaggcaaagttccaacagttacaaggtggcaaaagtgagtagaagtgggatgtgttgggaatgtctggggctctggtctgcaaggatagtacacgtgaggatgtaagagccagacaagcctggagaaatagcatgtgccagatgataaagaatctgtatgcctggccagggagtttggacttgactccctggcctggaacaaggtatccttaaaggattttatgcaggtggatggcatgaggatattggagcttcagagaggctactctggaggcagaggaatgggcatgtggggtctgggggaagccgctagaggaagagaagtgagagacagggctggtagggagaggctggcctaatgggggtcagagttaggtaaatatctgtctggctgacaaggaggaggtgatgaagaggtgaaaggggcagggcctggagacctatcagacatgggggaggcgtggaagctggggaggtctgtgctagagctgatctagaagatgtttctgtgggggtatcacagcccagggtatcaccacagacaaaggggaagcctgggggggttgggcagtgttctcttcactgctggctctgacagtgatgaggaaaggtgagccctgttaccgacgacactatgggtagcctggatttcttgcaatcctataggactgccctgtcaagctgatggaggaggccagagggggactagggtagaccgagcaccaaatgtggccatcctcacaatacacaaagctaagaatctcaggaagcaatgcctgggagagtagtgggtgtgatctctccactgcctccctgcccttcctaagatccagccacacttgcccgtccccaatcacgctgtgcccgctctgcctccaagcgtgtatatatgcgattccctctgcctgaaactcccactgcctccatcctgctcaatgcggctgacttttcctttaggactcagcctggatttcccagccctcaggtgacttagggttcctctctgccaccctcccctagcttcttgtctcatttctaatcacagtgatatggtgccctttcttcttgtcactgaccactactagatggtaagtgccttggaggttgaaatgggttgtattatttcttaattttcagggtcagcatgaggcctgaaagaatggacaggcaatgtaggggtggatagagggaagaagggagggattgatggaggagtgactggaggaaccatagatggaaagaaagaaggaagggacggagaaaagaaggagggagggagaaatggaaggaaagaaagaagacagggagatatgggtggacaggggaatggatggatttatgagagattgatggatgtataggaggaatgaaggatggatggatggagagatttacagacacatgagagtatgaattagtgaaggaatgagtaaatgattgatggagtagtagaatgagcaaataatgagcaggtgaataaataaataaatgatcaaaagaatgaatgaacaagtgaatcaatgtttgagtggatgaatgaataagtaaataagaaaataagtgactgagagaatggatgaataaataagtcagtaaacactttgcataaaataaaataaaaaataaatggattggtgaatgagctgataaacgaaagtagttagtaaagaaatatcattggtcatctgagcctccccacccagcaatatttgtagccctaatttcttcagccagttgtggacgtggctgtatccccagtgcttataactgtatctggtgcatagtaggtattcaataaacatttgatgaataaatcaatggatgaacgagtgtcggtagatccgttgacccagtgctgtggcaaacactgaggttgatattaggagcctggtttttaatcctagccctttgcttttcaatgatgtcactttgagctcagcccctttcttctctgagcctgtttctctatctgtaaaatggaaaaattgcctttatttgtcaaggctaaggtaaagatgtgattgttaccagaaaggggtcctgatctagacctcaagagggggttcttggacctcgcacaggaaagaattcagaggaagttcataaagtggaagcgagtttattaggaaagtaaagcacacacagagcagtggcgtgggttgctcaactgagtatacttacagttatttcttgattacctgctgaacaaggggtggattattcatgagtgctccaggaaaggggtgggcaatttccagaactgagggttcctccctgctttagaccatatagggtaacttcctgacattaccatgacatttgtaaattgtcatgggtgctggtgggagtgtcttttagcatgttaatgcattataattagcgcataatgagcagtgaggatgaccagaggtcactttcatcaccatcttggtttcagtgggttttggctcttttttttttgttttaaccacatcccgttttatcagcagggtctttgtgacctgtatcttgtgatactagtcctgccaaccttctatctcatcctgtgactaagattgtctgacctcctgggaatgcagcccattaggtctcagccttattttacccagcccctattcaagatggagtcactcctgtttcaatgtccctgacagaataataagagccacatggaaaaaataagggctcgacaagtattcattcactccagtccccccattcttttcgtactacctgaaatccctcctgggtttttttaaaattataaagcccatactatgtctcttctcttacagaagcgcactttctcatttgcacatctgagcagctgaatttcacgcatagcacctcccggggtttggtcaaaggagacaaagactctctcctttgacacaaactagtctgtctcctctgagtcctccacttgactaggcagcctctctgtccttgtagactccagctggagcaagaatcctgctaaatcagtttagcaaaaatccccactcttggtgtccgaccattgtggatatctgatcagcttggcctgccttcagcaataatcctctcacgttagtttagccagaaaatccctgaggtttcctcttagtaattttccatccgtggacccccgctctgctccttggttataaattctcacttgtccctgttggagtcagaactgagccccatctctcttcccactatgagaccccactgcagcgatccctatacccatcgccaggggaccttgaattggcctcaccaccttcagcgagtgccacgaataacgttttctttaagagttctaggctcatgaaaagctcttcctctcagacgttcccaccttagttgagagctctccacatttatagtttactatttttgctttgatcatcatcatcatcattactgaaaatttcccccagagcttcaggcagagctgggtagacaaaatacttccggcctgtttttatcttcgtttttaattttaaatggagaaaacatgggatgggtggaggaagcaaaagtgctttctactcgagtgaggtttaaatttctgaacgccactatccaagctcactctccactggttccgatgagagctggggcaaacaggatttccctttctttgcagtgaggaaattgcctaatcatttgcaggctaagaggaaagaccgcactgcagaacaacttattttaataggaagcaccaagacttcttatcttaatgctgacgaccgcccgtttatattagatgatcccctgagcgtctctccttttgtctccttgagtttgaacccttaagaccacgtggacggtggggaaatcctccctcaacgtgcatggctcatctcgccacgagggggcgctcccagatcagagacacgcggctgccgcccacccacctcgcggccgccacctcctgtgcgtgcatcatcttcgcgcacctgcccagagggcggggccggggggtctcctgccccattaagactccctgaagtccaggtgcagccctgaaggctagagcaaggtcactaccgaggaacaagatgtcctgtgagacgtcccgggatctctgtgaaaactctggacctctgggaagtcaatggggactgcactgagggcctactgtgtgccagggctttatgtaacccaagttattcactccacaaacactgagggcctgcagaggtggctgtccaagaagggaaggaagctgagggtgaaggagggagcctgaccctcagaccagtttccctggcagccagcagagcattctgcagcatgctgccaagcaagaaagtggtctcagctgtgcactagcttcagcctgctcctaggggagctctggagtgggagctgcactaccacgaggtgagtgactggtcttttatgcccctagatctggagtggggaggggtatgacagccagaatcaggggcctagatgtggctcccatagcatccaccccaaatgtcagcaatgattgttttcagattgtggttacgttgaggatccgtcccttaggcagagagcatggaggtggctctcagagacaccctctcttccagggctccccagggctcctcagtgtcagccccaactctttcatgagagtgtgctaggacctccttctccaaaagaaaatctccagtgaagatcaatgtgtaaccttgggaggttgagatgagagagatgatgagatgatatggtggggatgctttaggagttcccaaggcctgctggtgctctctgcatactcacctgtgcccaaactgaaccaagctcattctcgacgcttttcctctttctctctcccaatccagtcaggtgccttgtcctgccgattccatacccttaatgttccctacccagactggcagttactgtgtagttagcagacaagcaaggactttgggggttaccctaaaaccccaacttagctcttgagtgaatccgggaatgtcagtgtggaagggattttttggatgcagaaaaggtttcttgcaagtacttgttacttaatattcaatgtaatacagtagcttaaaaaaaaaaccctagtcattcttaagcctttaagttcaatttacaaaacttattattcgatttctatgcagtcagtttcaaggggcttttgattaatggtcaatcgactcatactcggttaaatgattcataccatttgcaaacttggttaattaaattatcttcaacattttacacaggacttactaatttaacgtattcaatttccttttttaaacactttcattgcctgacctgacaagcaaaactttccaaagtacttaaaccactttggaaaatctaatttaaaaacttatacaacagtgaatctcaagatctcttatacattctggagtcatttataaatttagtataaaaagattcatgtgcttctcaacggaagaatcacaagtctaaactcaattacatattttaaataggagtcacaaggctaatttgttcatactctaatatgcaaaaaaaacctcttcaaagttgtgaatactttaaataccaactacacaataatataggcttgacttctaaacctttgtggggttaaaagatatctgcccagtgatggaaaagttccccattttaaggtaattggggtgacatctttcagtacattgtactacctcaggggcaaaggtttcatattgtggcagaaactgctggatctctaatatccgtgctcccctgcctccttagaaatagaacctcagactctaaatgggccaattggctacctagaataaagatggcatttcccagcctccttgtatctgagtgtggccatgtgactcagatctggccagtgagataagcagaaatgttacatagcaacttccagaaaggacagctgacgcgtatgtcctttccccctcttttttatttgttcctccatcttgccacctggaccatagatgttgatatagtttggatatttgcccctgtccacatttcatgttgagttgtaatccccaatgctggagatggggcctggtgggaggtgtttggatcataagggcggatcccttgtgtgtgtcttgggccatccccttggtggtgagcgagctctcgctctgagttcacaggagatctggtcattgaaaagtgtgtgtggcacctccctcgacccctgtctctctctctcttgctcctgctttcattatgtgacgtgcctgctcctctttcacgttccaccaggattgtaagcttcctgaggcctccctagaagccgagctgatgccagcactatgcttcctgtacggcccgcagaaccataagccaattaaactgctttctttataaattacccagtatcaggtattctttgtagcaatgcaagaacagcctaacacaggtggagtggtcagattccagtcactgtcttggacctggaggtccagggtccccctttagggctggtggtgtgatgtgctatagaagaatcttgggattctgacaacttcatgaacagcatgtccacttcaacctgtgagagattgtttgggaagatccctcccatcccagtgcttcttggcaatgtgactttgccctcttcccatcaagagataaagtctgtttccctcccttgaattggatgtgtccctgaatcaacccagcactgtgctcccacctccgtgtggcaaaattggcattgggtgacttttggggcctgacactcccatgtgagaaagacagcctagcctcccagaagatgagggtctccagccaggagcaccagctgctggcactggagtgagcccatgtaggacccttctgcccaggccaccttccagttgcctgcagtttcagaagggagcccaggagaaacccacaggggaagttcaccaatgtgcaaaacatgaagtgtaaattgttgttttcagccaccaagttttagggtggtttgttgatgcagtgaaagctaaataaaatccagccctgggctgcccacctctgactttttcatgagaaagaaactttgatcttgtttaaggcatgatggtttttggtcttgggtgaacggaatcctgatgcacacatgcacctctggaccagagatttttgctttgatgtgatacctcagtggccagggtgattctctcttgctgctgatggatgtgctgagcccttttttttttccaatcggttgctatgacaacaagggactccatatcctctaaagaggttggtatcttgtgggcaattagattctggccataccattacctaattcttctgtctgatctgagaccagagttccctccacctccccccagcacccccggcactccccgccttgccctcctcctgcccaggaggttaaagctggcttcctttgctaatctccttattgctgaattgaattctgaagctgtttcttgcccttgctgtctgctcaggctgcaattcagatagatacttagaggcttccttttggattctgcatctctccctttctgggctctgagctgtaacatcccttaagtcaagttagatacagaatgagaggcttcttcttctccaagcctctgttttcttatctgcaagacggagagagcttaccaacctaacagggttgttgggaggtctctgagactctgtctacaaacgccttgcagttctcagccccctcactcccgccaaggccccaaatgtcttcctggaacattggcaacaaaatcttagacgctcactgtggccttagggcctgcccggctctcacctcctgcagtcctcaccagcctcactgaccttctgagggtccttgggccagcagtgctcccacctctgggcccttgctcttgctcttctctctgcctggggtgccctcccctcagctctttcatggccgctccttccccattcttcaggtcttagtttattttattttatttatgtatttattttgagacagagtctcgctctgtcacccaggctggagtgcagcagcgcgatcttggctcgctgcaacctctgcctcccgggttcaaacagttcttctgcctcagcctcccaagtagctgggagcctgctaccaccacgcgcagctaattttttgtacttttagcagagatggggtttcaccgtgttagccgggatggtcttgatctcctgacctcgtgacccgcccacatcggcctcccaaagtgttaacattacaggcatgagccacggcacccggctaggtcttattttaaatgtcgtctccccagagttttccctgactatatcatcagaagagcagccaatcccatcaacagtaataatagcatcacaatgaaattataactttaataaatagttcttagctgaaaacttatgtccacacaaaaacccacacatgaatgtttatagcagcatgcttcataattgcccaaacttggaagcaaccaagatgtccttcaggaggtgaatggatgaactgtgcaacgtccctcaacagaatattattcagcgctaaaaagaaatgagctatgaagccacaaaaagacatggaggaacttaaattcatattgctaagtgaaagaagccaatctgaaaatgctacacactacgtgactccaactataagacatcgtggaaaacgcaaaactacgagagtacaaagatcagtggtttccaagggttttgagaaggagggatgaataggcaaaacacagaggatttttaggacagtgggacttttatttatatattagatattatatataaaagcatatttatatattatatattagtgggactagtattttaatattattctctgtgttactgtaaaggtagatacatgtcattacgggtttttctcaaaacccatagaatatacgggacaaagagtgaactccagtaacagtgcatcaatattggctcatcaattgtaacaaatgtttcacactaatgcgagatgttaataacaaggaaaactgcaggtgttggggggaggtgaagagatgtacggggattcgctgaactttcattcgagttttctgtaaacacagaactaaaaaatgggccgggtgcagtggctcacgcctgtgagcactttgggaggctgaggcgggtggatcacctgaagtcaggagttcaagaccagcctggccaacatggtgaaaccccatctctactaaaaatacaaaattagccgggcatggtggcttgcacctataatcccaactacttgggaggctgaggtagaagaatcgcttgaacctgggaggaggaggttgcagtgagccaagatcatgccaatgcactctaggctgagtgacagagtgagagtcagtctcgaaaaaaaaatgaagtcttttgttttattattttattttaattttatttttttgagacagagtctcactcttgtcacccaggctggagtgcagtggcacgatctcggctcactccaacctctgcctcttggattcaagcaattctcctgcctcagcctcccaagtagctgggattacaggcgcccgccaccacccccgggtaaatttttgtacttttagtagagatggggtttcaccatgttggccaggctggtttcgaactcctgacctcaagtgatctgcccacctcagcctcccaaagtgctgggataacaggcgtgagccactgcgcctggcctattaattaaaaaaaaaaaaattaaagctcttacagcccttaatgtatatacacttacagtggggttttctttgcttattcctgtctcatctcctagagagtgacttggtgcatcaattgatagcccagggcttggcgcctgggcagcttttattatgtggtaagggggtataactgtgccactcttatgcttaaaatgcaggagtaaattccaagcccattaccgtgctgcataaaggctgtcctgatctgaggctaccttagctgttaacacatacaactcccttgggtgatgttgggtgcagacctgccacctgggaccccagagggaggaagttttcaatgctctttaaagccttccaattctattaaagataaaggctccatctgagactagtaagtctttaacacccctctaatgcttgcaaagcttccttttgtcctgtccctaccagacttcagacttcggcttagagctggttcctcatggtattgttccttgaattgttgcttgaattcattgttatgccacttctattaatggaatataatactggttttccattcatggtaataacattaagcttccttcttaaatcagctcattcatggttttaaaaaagtaagtcgaattaaagaaaaatgttaaaagatagtgtcggctgtgacagattgcatgtggatgtctgaagtttaagaaacacgacatgaattctaagagtctttggagcaatgacgtgatgatttggttttcaagctgaaatatatttatcacagggttatttatgatgcaataataataataataacaatgaaagcaactcaaatgtttatcccataggaagggtgaccatataatttttcatccagaactcttccaaaagtgaatgaggtgctattaataatgacaccagaggaaaggcacaaccttggaacattctaggcaaactaccatgttcattaggaaatgctgaagtaaaccatggtatatacagtttgtaaactattgtgattatgcagatttataattgacacttataatgattgcataaaaatgcttaagacattataatgttaaacaagaaaggcatatcatccagtgttcggagacacaccgaagaaccaccctgggagaatatatgttaaaatattaatcatagctaactctgagaggtgagatcaaggatgatatttattttctttgttggagacgtatgtataaatgcgtatacctcagcttgttctagaaaactcttattcgacacacctgaccatgccacctctcttgaacttctccacatccttcttttgttcctgagacagagtccacacatcatgaccacggcctagaggtcttgtgtgatcaagctccctgctgtgtctctgcccagccaccaaagccctccctgcgctcacagctactcacaccagctctgtcctgcccctccgcaggtctcagtcacctcctcaggaatcctcagcccttgccaggccaggtctctgctcctgacacctgcatcaacctttgctgttcagtcttcccaaagtaactctttttattttccatagttatttgctctgcgaggtctttcctgctgaacgcaaactccttgagcacagaggtcatgcgctcatctccaatttatccccattaatgcgttaatccttactgtgccttggcccgggcaggggctccataaatgatcttatctgaacctctgactgttgatcaatttcatgggaaacttcttgatgcatttctgggttttaccaatgttcctaaatggacaacagatactgttgcaatctgtaaaatcagtgaggaccttgaatagcaacattccccagtggattaaaatacaattcgatttgccaaactttgatttatacactttccaatgatctgtcttttatgtaaagcaagccccaattcagagatttttctccccgaaagctcaaactatgaggctgcatttttcaaggctgagacgggagtggggagaggagggctccaggctggtagtttcttaaatgccatccaccactaccactggcagtgtctgagagtcctgatgcctgtggctgtgtattaaggagagaacactgtgactggggctttgatctcaagaaagaaaagctcccatgtcactcctcctggtacctccgtctctcatgttcactttggagagtgccattcgctgacagggacgcagaacgttcccttgtgctccctgcagcctgctctttatacaacagccagcacagtccctttaaatctgggtcagatcatgcccctcctgtgctgaaaatcctccagtggctcccatctcaccatgggtcaaaagtcaacatccatggcccataagtgaggcatcaatactatacattatccaaaccaggatactttgagagtaaaagcagctccacagtcacacggagtgacagtgtaaactgggacagcgcaaggtgcgggacgccctccaccatctggtctcttccacttcggcaccctgattctcgccctctgctcttacttgttgccttagcttcttactcttcagtacagaaacagccacaaatccttctcaaggcctttgcatttgctgttccctcttcccgggaggctatttccctcactccctcgcccagacacccacaggcttacctgctgcacatctctggtcgaatgtcacctgccagagagcctttgtgccctctctgagtgacagcctccctgcccctgtcacttgcatccctcaccctgtattttccttcacagcactagcaagcgcctgcaacctggagacccttgttcatttgtaggcgactggtctcccttgttagaaagtgagccccaggaagtaccaactttgcttaatcactgctgaatctcccaccactagcccagcgcagggcacacaacggtggcttagtaaatgttcatcaaagattggaggaatatgggaggggagggcattaaccctgactatgcaacaactttgggtcagacactgtccctgtgtcttatcacatgacctccctctattcatcagggcagaaaccatcacccccattttggatgaggcaactgaggccttgttgattagttgactgacaggtacagagcaggtgttatgtgtcagctcctgaaaggacgaaagacattaccatatttcaccatcattttctctaccaaagagaaaactctttgggggaggccacagcccacctccagtgactggttagcagagctgggaccatcctcacatccccaggtgagactctcactccagtgctccttcttcaagtccagacagagcatggatcttaccaagaaccagaaagccctttctgatttcctaaacctgaggacaggcctgtaggagctcaccaggtgtaactgggatttaagagtgagacagatgcacattttcagaaggcacacttcatgtcaaaggtgatgaaggatgaggggagccctgggaacaaagaataatggggcttggtgtaagttagacagagacgagacaaatcatgagggaatgcaacatagatgcagatttacatattagaaggctgattataaatctttgttataaatctgcatagctaacgggaggcgacatgtagccagcacatgaatcaagaatgctgagatgacatctattagggaaccattgttcctgacactgtcgtggggatttttgttgttttcactttggggcctttaattaacagacaagccccatggctgggctcatttgtgtgaagggcttggagctgggggtgggggcggggtgatccaaatctgagggatcataatgattgtcgtgatcattatgacaagactttcctcactagtgatggtgtacggcgttgtcgtggaaaccgtgcgcttattagtaacgtgctcttttaaggttaccgggatgttggaatcccttaaccaatgcctgctctgtgatcactgcacagtggcctttgtagcatggacaaagaaccagtaatccgcaaggccttcaatgtttttattccaaatctaactctggcttgctccacatcccccacaaacagcctattaaaatgatctccttgagccctctgggtgctggaaatgttctatggtgtgatctgagtggtgaccacacaggtgtatgcaaatgtgaggctccattgaatgacacacttaagcacacttttatagcacatatgttacagctctattaaaaaaattaatttcacccttttcttaccaccagcatagttttgtcttttcaacaggtgtgtgcctcactcaggtgacatcagaaataccataatcagaggcacacccctttaagaagaagcaacaatgtgaaaatagcatgcaggtataacccaaagcttctaccagtcatcttaaaagcacatagagccttagaatgaacccaacacagagcagaagagagcctagtgatgcagagatcgtgatatccttattgagtcctttgatcaaactctacctgaagctaaatatccctcggtttttcatttatgtgaaccaacaaattacttgggcttttttttgttgttgtttatttgtttaacccatttgagatagttaggaatcataaacctcttatgtatcaggtgcacttcatattactgaatatattactgaacccagtgaaatcattatttttctctccatttgacagactggaaactgaggcacagtggcattcagggacttgttcagagtcacccagggaagcagaatctgaagccagttctctgtggctcctaccatgctttttccttcttatgaccacgtgaaatcggtccagaaaagaaagtccagaacaacagtgttctgcagtccatagcataaggggaaaagtactaaaaatgaaaaaaaagtatttctcataaaaaaaagatttagaaagaactcacaaaatagtggtgagagggtgatgtgtcttatcctaaacatggtattgtttgtcttactcagtactttaaaaaaattacctgcctagagattgaaaaacagagatgtcacatgcatattgagcaatctctgcagtctcttggaaatcagagaaggttttgccattctagggccacatttcccacagcgtatactctccagttggccccaacccccaccagctccccttactcactggcatccacctacgctgtgtcagaattgatgcattgataataaactttaatctgctggaacacttttgttgacttggattccataacatattcctactctataccctaggaggtctagcattcacttgctctcctactgggatccatgctccattttcttcttgagaaccacccacttccttccccactatttcgagtggggttgaatccatccctggctccagtgatgtccatgtgattcggttctaatcaaacagagcatcacatccatctgtccacagtgactggcatgagctcaggataggacacatgacccaattaaagccaataagatgtcatgaaactttgattgagattggtgaaaatagcatgtgggtataacccagagcttctgccagtcatcttaaaagcacgtagagccttagaatgaacacaatacagaggagaagagagcctagggatgcagagatcatgttatccttattgagtcccttgatcaaactctacctgaagctaaatatccctggaatttttatttatgtgaaccaacaaattacttggattttgttgttgtagtttatttgtttaacccatttgagagagttaggagtcatttgttttcaagtggtagacagttcttccctggagaatctcccaggctagtgacaacaggatcgggactcagtgggtaaaaataacagaaacctgaacttcaacctgacataaagatggaactttccaacactgaatcattgaggaataggaatatgttgtggaatcctagtcaacaaaagtattcaagcagattaaagtttcctatcaatgtgtcaattttggcacagggtaggtggatggataagatgaacccaagccttaggttccttccattttgatgatcctatgaatatcatgaatgacacagtcctcagagaaggatttcctaaataccctagggaggtttctcccctacccttgttatcctttatctccacatcccaactatttcccaacaattaccattatttttaatgattgacttatatttttgtctatgtgtttgtctcctctactagactgttagttccataacagcagagatcttgtccatttcatttttctgtacttccaccacctagcaaaaggcctgccaaacacagtagacctttaattaagagtttgctgaatgaatgagagaatgtatgagaccttcctcactctgcattttctatgaagtcattcagaaagccagtgtccaaatggaacccatgaggtctgtagccattaaatctcacattcatcctatttaaagacatctcatcaacaacatttaatgcaaaatgtcattttagtaaaggacattatgccacccatggctacagcatcctccatccctaactcactcatccttgtctgggaacatgtctctatctcctgtcctggtcatctagcatagaaaacagcccatgggaattatgtgggatgcagactccctctgcagcacctctccccactctcctcattgtgttgcttaatgctcaagctttgtcaccatcccttaagacaatgtaggaaaaaaaactcatttactgagcacctactgtgtaccaggatctttgcatatatgagctcctctaatcctcacagcaactctacaaaattggcactattagtctttattttatggaggcaggaactaaggctgagagaagccaaatggcttactcaaggtcgcacagatccaatgttccaatttaaagctgtgacacttcacagtttttgctctttctgttatcccacacttggttttccaacctgaatatgtgtgtgtgtgtgtgtgtgtgtgtgtgtgtaactcttctttattccctagcactcttttctgcaaattttttttctctctgaggactgaggctcacacacatgtgcacgtgcacgtacacacacacccaccaagtcatcagcatctttcttttatttattgtactggaggagcaggaaattacacaagcctattaaaggctaagcaaattccaagtaaattgcataaatgggatttttttaaaggacacaaaataactctaaaacaatctatccatttcagaacatcatcagatacctggggactgcgcatgaagagatgtgctcagcagcatcttatacaaattatccagactcaagccttttcctctcctatccagcctcatctcctggacccacaaaccaaaagagagtgcctgggaatgagagagcaaaagagagacagacagacagggagggctttgatggaaaccaagacatcaggaggtctctgcctctgattcagggttatttgaatcaagggaactcatttggcctcaagcacttaatcattttattcctctttctggttttattttgagacattaagaggaaagaagcattatggggattgaagagggctttttctctttctagctgctgcttctggagtcccttacccaatgcccagtgcgtatgttgggccagatggcttggactcttggcagccaattcagctgctcaagaacatggttgtgcttaacttcatcagcttgactctgcttcagttcaccatggagtagaagcatgatacccatcagtttaattagtttaatgagggctgagggaactggtccacattttgagtttgttgcacagaacaaattggtttgcctttctccctccttgatcatttaagcattcaagaggctgctctcaatcatttccgaaagaggttttcactcccttctgtaaggagttaggcactgtccagggtaccaacatgactgggagttcaggaagtcagttcttcaagaggtgcttttctgaacaatgaggactcagagtacactgactaaacattaaacccactagaagactggaccctctactgtaagggttcctgatccaatataaggcaatgtttaagctttttacctaaagcatcgtctccaaagtcaggtgcacaggagatcttttgagatttgggaatataatgttaggatttctgtgtatgattatttaccttcttttaaagttctactctttgtttatgatgtgtatactatctgcatgagggagcatgctcatatttcttctaagaggggcatgtgatctgttaagtttggacatcatagacctacaggtacaaagaacacatcgctctggttccctggaattgaggagtcacgtgaacaggttggaaggacagatcacaaactgctgctgctgctgctgctgccgctgctgatagttttagagtctaggtgtctgagccaagcactaagcctattgtggggaagggacatccacccttccccatcacagaccccagagaaataacatactcccacgcagaagagagataggctgggcttggatattttgtacacaatgctgagctgagcatggggaaggggcacatataagaggatgaatgaatgcactccaacctgaaaaggtgtcaggggtttctcctgactctactccatgaaaagaggtgcttatgcatcaaaaagctctccagagtaagcattcggatcttcctgagaccgagtcaccaccttgaactggcgccggagaaaaccgccatagcgcttctggttgtcccacttgagcttgggacgaatgcgccgcaagaagcccccatagcgtttgtacaggtcctcatggcccatgctatccccgtccccctccccagccacctctgagctcctcttggggtatttgcgcaaaaagcccccatagcgtttgacctgctccttggggtcctcctcagcgagatagagtgtgccagtctccatggcaccatcgttcagctgggcatccctcatcagctcagactctgctccctccctaaacccgtcagagagacccctgagcttctcctccaggctcttgctcagagtgttctcctttgttgagatacttgggagaaacttgcttttctccagctccttcaggaatgacccagagagcttggccagctcactgtagggcccttccccaaccgacttgctccccaagtcctccttgtcattgagcccaagggtggagggggtgaaaaaagacagaaagctctggcatctctcccattcctcagagggcagcagggcagcctggcattgcagggagcaaatctgcaaaagacccaaaaagaccacagtggcaaatgatcaaaacacatgcactggtctgccccaggctcccctgtccagtgtctgagaaaaccaaaatgaacgccactgctaagccctgggctacccatgttcatactactggtggtgcataaaggtaggggactttgtgcctgtgagaaagagaagacagacctggagaggtgaaatggctttagacccaggacacatggctgcaggtggcaattgccagaattggaagtaagatcttcccgtagtgttctgcgtgctcacctttccccctccacgtctgactcccagacaggaaaccccatctccactaaaaatacaaattctctcccaggcttctgcaggtgtgaagcacactgctaactcttggtaaagtgggacagagaagtgcagcatggcagagaacacacaggagaggacacaggagggttcatcaggcctggggtggggggcaatggcatcacttcatagggccattgggagcattcaatcataatgacgatgacaatagcaaagaatatggaacttgaacccaggccgtccagtgccatgagtcttcatgcttaaacgtggtgctctttgagattgggcacgggcaggacctggcccattgtgtgcatctctcagtggctagaattatgtattaaataacttcttttgtcaggtgcagtggctcatgcctgtaatcccagcactttgggagaccaaagctggcggatcacttgaaaccaggagtttgagaccagccgggcagacatggcaaaaccccatctctactaaaaatacaaaaattagctgggtgtggtggtgtgcacctgtagtctcagctactcgggaggctgatgtacaagaatcacttgaacccaggaggcggaagttgcagtgagctgtgatagtgccactgcactccagcctgggcaacagagcaagactctgtctcaaacaaaaataaataaataaataaataaataaataaataataacttctggcatgggcttgatagcccatgcctgtaatcccagcactttggaaggccgaggtgggcaaatcacttgaggtcaagagtctaacaccagcctggccagcatggtgaaaccccgtctctactaaaaatacaaaaattagccgggtgtggtggtgggtgcccatagtcccagccactcgggaggctgaggcaggagaatcatttgaacccaggaggcagaggtctcagtgagccgacatcatgccactgcactcaagtctgggctactgagtgagaccctgtctcggaaaaataaataaataattaaataacttctttcactatctcatggaatcacctccattttgcagatgaagaaaccgaggcttagagagggagttccaaggtcatggagctagaaagggacagaatcaaagtctgtgttctgtccctatgcccttggtacttctattccagcctttctgctgtcatgggagagacatgtgggggaacttaactcaaaggaaagccgacaaggtagggtcaagaggtgctaaggcccaggagagggtcaaagctttgatcctgtcagccagatctttgcatttaggggtgttggagacagctcctctcatggaactgtctagatttggaggtgctcatcagcccaggaaaaagaagccctgaaaagtcaatctagagctgctgactgccgaagtcagcaccacctcagaaatgacactccctgttgccaggcatcactctccctggacacctgagtctcttgtcctggcctaagtgaacccatgatggcgaggtctggagtggggacacagcagcccctggtgtccaggccatctatagggcaggacacccaccaccctgcacaggtgggatggatctacaagacagcacacagctgcccaggcctgcaacctcccctctctgggctgcctcgcacaggtccaaggacctgggcattgaagaaccttgcctgaaacctaccaggggattgataggtttgggaccatcctgggtctttacagcacacaaggagcaccgcgacaggcagtccgctgtggtggaggggaacatgaggaggcaggcagccaggaccagcccctgccaggccatcctgtctcagcaattcctgctggggaggaagaaagagaagataatgaaatctgtgatcaccactctgtagactgtgttctgagcccacaaagtcatctctaactcctgcccacagcactgcaaagcattctgattcccattctacagtcaagaaaacagaggcccagggaggtaaagcagaggcccaaagccaagggtcaaggaagggaatgagcacccactgtatacccagagctttcctgcacattcactttcaatctgcacaatagttcttcaatgtgggctgtgctagtttgattcaacagatggggaagctgaggctcagagctgggaagtggttgcacacagctaggaagtggacaagccacgacttgctctgggtctttcagacttcaaaacccactttggccacccgccaagccagaagatacttggctaaatgcttttctgagttctctgaggtctttgtccctgtgtcccagactgtcccatgtcagtcctttcggctgtgtgagggctttggaatttttctctcccactctggtactgtcactgaccttggccacggctccaccttcactccctctccctgctggcctccctgcctgcctccagttccttctccgattcctccttcctaccctgaaatgccggtcttggcaatatcaattctgtgaacacacccattgggtggggtcaggctggcccttctgcctaaatgtcagggctccctcagtccctttcctacaatcccacacttcagctctgggctccaaccacatcagcttcttgcaattcccttaatgaatgcatcaggctctgacccacccccaggcctttgcacatgctgttccctccgcctggagaacccttcatctcctattctgttacctgtcatttaggtcctggattagatattacttcacccaggcagctctccctgattgcctaggctaggtgagctgctcctcctttctattctcccagcaacatgtgcctcttccatgaaaatagtctactatttggtaattagctatgcgagtcttcaggatttggttccacgtcttgtctttttctctgaaatagtcactctgttcctcaaataagcttgctcctacctcagggcctttgcactttctgttcttctgcctgcagtattttgacctcagacttctacatcactagttccttctttgtcattaaattagttgtcacattggcagagaggcatttactgatcactatgtctaatgaggcttccttggtctctctcttacatcaccctttgtttgcatcagaacactcccacctcatagtctcctatctatctgatgcttggttgttgttggtggtgtgtatgttgtggttattgcctccccaatagaatgttagctccttggggacacagaccctgtcttattctctgctgtatactagctcctaaaaccccggccagcacatcgcaggtcctccataaattcttggcagatgaattaatgcttcataaatactctgttaaaagttgtctgttttgcagggcatggtggcttacacctgtaatcccagcactttgagaggctgaggcggacagatcacttgagttcaggaatttgagaccagcctgaccaacatagtgaaaccccatctccattaaaaatacaaaaattagctgggaagagtggcatgtacctgtagccccatctactcaggaagctgaggcaggagaatcatttgaacccaggaggaagaggttgcagtgagcagagattgtgccactgcactccagcctgggcaacacagtgagactccatctcaaaaaaaaaaagttgtctgtttcatagtcagcgctttataaatcagacatcaagactcagggcctcgatatttgatttatgggggcgcagtacagttctttcaactggatcctctaagacactccaccccaccctggccaggggcttcatgcttcgcccagcatggtctttgtaacctgacaacaccaatttactctcagaaaaggctgtcctcttttcctccaacttccccatccctgcaaactgccgtgtttgctcaggtgctcagagtgttttgaagcttccactccacgggccccagaaccccacgctgtagccagagcagggtctccccgttaaagcatgcagtaggctcccccaccagagcatgcctaatagtgatcccagccgccatttatcagatccctactgctctaagctcttcaattcatcacctcatttattccttcagggaagcgggcacttctggtctggtgaattgcccatgttctacctcgaatagtgaagctggggtgcaaggcctgctctgtttgaccccctacacttaatgactacaatttctagagcaacttcaattcagtggcagctgcaccctccgtgagatccaaggggctttatatacaaggcccttgacctgtgtattgtacttagcctacccacaaactgtgagaggtgggtatcactagccccactttatagacaagaaaactggtgctcagagaggcttagtaaatctcctgaggtcacatagcaattcgaggcataagctcaggcccatgtgcctcgcttgaggctggcaaggtcggctcccctgaaccagggaggctcagtggaaaagtcagggaagcggacttgtgtccctcctgtgtctttctcttccccttgagtctgtcagctgcggagtggattacagttccccaccagtgagccatacaaagcgggcagctcatgttttctctgatatcagtgatggctgggctggcctgttagaagatcagcagtgaattaacctactggggagggggcgcctaccacaccatctaactcctggccgaaggcttcccacacagcttagctgcaaaggtaggggactcacgttaagatctctttatctcaggcaaaaacagcattggcatccttgtctttcatccattaactttatattgaatgataattctggttgatctgaaggtaatgaagtactcacgatgttctgagcagttctcgtggattaactcatacatattcacagaaactctacagcactggtgctgttgccatgcccactttacagatgaggaaactgagttaagattctagagcctgccaagattctacagtgagtaagtggcaaagctgggattcctaccaggctgtctggctccagagctaccttcgtaactgctgtgtactgcccaggccccttcagtcctctcatctccagcctccagcttctccctccaggtggaccctccacctggttctggagtagcctccaatctttccctcctagacactttccacgcagcagctggaggacccttctgaaatgcagatctgactgcacctctgccctgtgtccactggcttccagaggaagattgtccccatcacctagcagccccgggctctcctaataccaacagctgacatttgctagtgctccctgtgtgcctgcccctgtgctcagaactctgtgtgtcttattgtaagggggtccttctgacaactccgtaagactgggactaatattctccccatttatggatgagaaaatgggacacagaaagatcatatagtctgtccaagctatcccagcaagtacacagcacccagacagattggatgtgagttctgcccatcctgggcttgaccaaaccacctgcaatttcaaaacaaatgctccacacaccccaccctccaagcctttgcacaaagggtttcctctgacaggaacatctttctcaacccactcatccactcccatcacactttgacctggctaattcttactcattattcaaaactcagcctcagttgcctcttccaggaagtctatctggattagttccctcctttgagctcccacggcctcctatgctggctccatcacaaaattaccacttacctgtcagtcccttatgggcaggtaggggggtcgctgaggtgcgagtgtgttgtgcttgaggatgacaaagaggccagggtgcatgaagggacgtaagggagagactggggtgaaaaagcaaagaggtgggcagaggatggataatgccggctctcataggccaagggagagtttgcatttgatctaaatgtgactggaagactaaggaagtttgagtgattgatgaatgaatgaatgaatgaatgaatgaatggtgtcccagtacctcatacagggctagaatgagagcaggagctgcacaccaattagttatgaaaataaacaggcaatattttaaaattaggcaatttttacatttaaaaaaatctcaattttcaatttgtcttgaaaaaacaaaaggcctggggacattgagcctgtattccaatatggcaacagtcacagaggaagagccatactgcccatcgccacccgcggaaccacctggggcttccctcactgccgactgcctgacagacaagtgagtctgcagcccctgaattacccactctaactcggagaagcagcatggggtggaagggacacagctgttgagaaaggagaggtaggacctcaaattctttcctgaccccgaagcaggatcaccaagtggtcagtaaagtgggctcaggtctcagcccaccacttaccaccactttaggaaaatgacttagctttactgtgcctcagttttctcagctacaaaatggggctaataataatgcttcagagggtggacataggaactaaataaatgatcacatttgaagcacctagcttgtgcttgaagcacctggcacatagtaggtgctttggagaggggagtatgaagactccagtctagtcttacttgagctgtaggggataggaaaagaagagggcaaaaaggagagatcataaagagcttggcacactgcagaaacaaaaaatgctgctgcatgactcactgccgtggacggagggcctgctgggtgttggtctgggctgaatgcccttcatccatgatcctgtcaacccagcaacagccaccgattctcaggagcctactgggtgccaggctgtgcattactgctttgtacatattagctccaatcctcacagcagccccagaggtgcatgtttttcttttaatatccattttacagagggccagactgaggctgagaaaggggaacttgctcatccaagttcacctggagttatgaatgggggagttgggctcctgtccagatccctccgggttaaaaggggaccctagtagagacacattggccctcacaatttcataggtgatcctatttccttccttttataggataaatacattactgaacaatgtcagatgggccccaggggaagcatttcgacctttctgatggggatttgccaaggaatggagctgggaagtcacacataagagagagccctgcctgcctatcatgtctgattagggatgggccaaggaggaaaggaactttgccgatcatcgggatgagaagtgggaagcaagcccccttggtaagcgggaggcatgatgtcagtatctgaccctgatggagggcctgcatggtcttctttcacagacttggccaaggacccggaggccacacaaggaaaagtcctttgcacttggcagtttgtgaagctttttctcagctgctacctcgggtgctttgtaatagcccagtaggggaaagaggggctgatggggcagtggggtgattctcccctaacaggtggggttgtttcagactcaccagcctgcctaatcacatgagccaattccttacgtcaatctctttctgcggataggcacaccttgttggctctgcctccctggagaaccttggctaatacgacacccatgcccctttgtttgcatctatgtctgtggttgttttcatgctgcaaaagctgagttaattgctgaaacagagactgtagggccaagaaagcccaaaatatttactctctggtcctttacagacaaggtttgctgaccgtactttgactggttttataaacattttatgattctaatagtttttaagctaattttcttgagtcctcaggcacttgaacatattcttaaataataaaacattttttatgccttgctagtggatggatctcttgccaggaggtcaggtgggtttcctgatggaagaggcaggaagcaactggccccattcttcagccctgagccctttctagttgcctggactgctctcctggcaaatactgagaggacctggggaggcttgccttgggatttaccttttccttgagagggaaaggcatgggctctgcggtcatttggtgccacctcctccacaagcctcagtcttctcatctgtgattggggtgtatcatcttcctgcactgagacagcactgcttaaagggccagcacaaggtagaccctcttttcacccagggcccagagttccttgaaagggaatgatctttttgacgtcttggcttctcgatgatatttctatattgtagtcagctgagggctcagaggagccgcaagcgtttttatttaaaaagccagcatggaataataatggcttgatttaacattgcaattatctctctgagcactttagcgcatatgattacccctatttgatgaaagaggaaatgggaaaaggtagaaatgaagtcacttgtttaaggtcatatcatgagtcacgagggaaatggagacagaactccagcctcccacacctgaaccgtgactcccactaaagagatgccattgtttcaatgaccctgcaatgacaaccatcctaacagccagcaaggactgagacgctgttctgcaccagccccgtgcactccaggtgcctcccgtggaccctacggggcaggggctaatattacagcttgggatccagatgggaaggtgaggatcaagtgacaaagtgcctctccgtggtcacagagcatggcagagttggaattctctaagtccatcgcattcctcatttagggtgtagctatgagaagggacaagctctttgctgtccactttatctcaattatttctctcttctcttgaagagaatccagtgggttgggaactattagttccatttccagatggggaaaacagaggctcagagtctaaaagactgggccaagaccaagaagcaaggaaacagcagaataagatttcagagtcagtctgctgaccacgccacaaaccatcctgaggcctaaatatgtatcgagtgtctttcggataacctcccaaactctcacattcctgacgttgaaaccatttcagaagcttttgccccacactcgaaagtgtaaagttcacccttgtgggtctccaggtggttggcaaagggagcccctgaacctggaaaagcggtgccccttgttaggtgttagcatcgtaacgaaagacgaatgatcaatgggaaggaggctcgggttctgaacagaaagtaaacccacactttagcctggcaaagatcaaagcacagaatcggatgagggtcccgtttggtggtcggctgcatttgctgtgcagagaccagagggaaagacggccttgcaggcagtggtcctggtgggatcattcactgcatatttaaaagaacgtttttcaagagcaaggtttggatggaaccgccaccctttttgttatctggtgcaattaagggatggggagaaaggcaaaaagaggataagctagagagatatggagatgaagagacatagagagagagatgtaaaaagagagagttagagatatagacacagagaaaaagacaggggcccaaaagaatggcagaggtgagaactgcacacacagaaaaagagaccgagacaccgagaaaaagcagagagaggtggaggaccatatgggaagaaaaaataagatgagacatagagatggggagaggacaaatgggaatagaagggaagggggtgaggaggaggggaagaagagggaaaaaagggaagggaagtgaacacaataagagagagagaagtggggagggagagtagattttgattcaggatgctgacataccgtgtgaatcacaaacaccaattctctccctcctgctgctctctgagtctgccctttgttcctagggaccagtgggcaagagaccctgccacataataactgctcagtaaaccgctgtcaagttaaatcaaatcgtccaggaataggacagggaccaaatggcagttcaagccaatgcatcaacaaattgcctcggtgcatatgtctgcggcttgtggccagccgctctggccagtgggatgacctggatggactcggaggagccccctgagccaagccatgtgcctcatggacctaggccatcgtcctcctgccaggagcatcagtctggatccaggctgggagggactgatgaggctgcgcttcacagcactaacagaccccactccatttcgagggtctgatcctggggcttacctgggtgtctccagccgatgttcactgcctaccacagtggccagctctgtctcagtgaaacaggtttatcactttgtcagacccagcaagattagccaacattcatgggctgagatgagtgaatacagtgagagaaatcagctgtgtaaccacactttgtcaggcatgcattgaaatcgaaccagtaactattgatctctcttacaatgatggaagagatctaataaatacgacaattgtgcaggaatgacccaaggaggtgggtagtgggaggtggatttagggagtatcgatcaaaaagagacttcatgatcctgatgcagcagatgaaataaaaagtcttctgctgggatggggaggggaaaggagcaccagcccctcaaatgaaaatattagacattagatcatatctcctggacatagcacacagcatgatggagtgggatgatcagcgatatgataatcgatggagagaaaggtccaacctcaccacttcggaacagtgaaaatctgagcagtcatgccagtatttattgagcacctactgaatgccaggcattttgctatatcccattggagacttgcaataaccttaggaggtgaatattattattattctcatcatacaggtaaagaaagtatgactcagagagggacttctactgttccaaagtcacacagtaagtgagtggtaggatctgggatttcagcccagcactgtttcaggtgttgtgagacacacgtgtagatgacagatggaaaattcctgcctcccaggagttacttcaagaaaccttaactccttccacgtgttttaagatcgcaaatctctcaaatagccccagagctgatccctttgcctgctcccttaaaatgtgctgccttccgccacatagccttgggaaccagtgtgacatccccctcccagctgccaacagaggcatagggtttgcctgccacctatcacacctctagctcagctggggcaaagcagtgggcttgagatcccgtcagtgaacgcaaaccacccccaggcagcataactcaccggcttgggctgctgcaacagctccccccacgcagatctcaaagcctgaagataaatgacctgcaaaaatagaacaaaggcaaggtgtggtgggactggggggagaagaggaggggaaaagagaaggaaggtgccacagaggggtgggagtgaggcctggggtgagaaagaacagaagaggatcgacattctgcaatgctttgcaatggatctcgactgggatgcctgtcaaattagaaaggcaagccttgtatatttcagcaacccttggaagaaagatgataatgaagactttcagtctgtgggaggggaattgaaatcagatccaataatcgaaagagcttgtttcccctgggaagactggagacttaattaagtaatgtttgtagagcttggagggattcttgatacccaggaaaaagtaagcagttgcagaatttactcttcaaccttggagtagtcagcaggctttttttttttttttttttttcctgaaactcatcagctttttgctagaatcaaactttgagacttggtacttttctgaatatgggtctctggaccagtgagcaaatggctttccctttgagcctcctcctggccttagactcctctggctgtagttaataggagagcaacaagtcctttccaagtaaaatggacaagaaaatgcctgctaagcctgggcctcctggcttgttgtcactcccttttcccattcccttccaacaaaacatccccaaacttcaacctgtatcaaattccatcaaaagaagccgctcaaaccagcaccctgtcagcaattaaacacaatccgaaaagaatgaaaaggccgaacctggccgtacattgatgtacatgttatgtgataaatgccagagccttggatctcattaatgtcctcaagccattgttctctaagtccagtgagactcattgacctttaaaatcaccctgattagtgaaacctctcacttctcccatccagggtgtcccattttccccagaccctgggaatggcatgggaactgctgtgtgggagactgcaagaaggagaccctggagctaaagccaaagggtggtcctcttgggagagagcttaccacctgtttaagccaggactgtgcagaaagggagagtccaaagagcagtctctcactggtctggcttttgtgaactagcctcctaactgtaaccacctttgctagataatcagacccaaacctaaaatccccagcccgagctcccaccatctctaggtccagaggaccaggaataagcaaataaaaccaagcgatagaattccagtgccccctctggatgttacctgcactctgctttgtccctgggcagcttctggccgagcaggtcggaggtggcagtggctggtccaaggctcaggggcctccttgactccggcttgggaggaggtgccaaagaggcagctgtgaacaccaccaaagccccttcaaatggcagttctggtgcctcttccccccttttatggacgagagcctcccctgtcgctcagcccttgctgagcacaggctgctgggagccaatggggaagtggctgagagcagtcagagcacagacccccaggcccttcaactcgaactccctgggcctgacacaataggcttctcttcgtgacagggatgtggaggaggaaggcagccgtgttggggagggggcggattctgggtgtagtgctgtttgtcacttgaaatccggccacttcagtttttgatgcgtttccaggagagtgtcacaggaaaaagaagacagggaaggacagagacagaagagttagagaaagagagagagagagagagactcagagagaatcggaaatcgagaaagaggcaatgtcggacctagggagtgatacaaaggaggggagaaagagaaagaaaaacagagacagagagtggcagagatagggagatgggtagaaacacaaggagagagggacagagcaagaaaaaaggaaaccagccaggtagactgtcagactcaaaacacactgatccacagacagacagacgtggagacagacagaggctgagacagtcttctgatcacggaagagagtcggaagatgacagccgagtcagcaggcacgtgcatggcccgctgttgcgtgccgtggcaactctgtgttggctggtgcacgcgtgtgctggaatctttttgtgtgtacatttgcctgcaaacggcattcggctctggtacatgcctgagctggtgccaggcacactagccctggcagaagcacagctcttccccgacagccaggagctgcagtttagttttctctggcggcaacacaaaatgaatagcaggaaaaacccctcaaaatatgggctgcaatatgcctcagcacacactctgggtgagggatggacccacctcaatatacccttggcctggaccagcagcagcttgaaggtggcactcttcattgctacagagatcttccagaacataagggtctttgagtttggaagagaacatgcttctcttctcagtcaatagcagacagtttgtggtgggaggcacaactatttcagaagtctggcagggccgcccattttgtgggcacctggctgcaccaggcggttaggtagagttgtcagatttaatcctcatgacctagccagttggttaatattatccccatcttgcagatgagaaaacagaggtttgagagctgagaaactttcctagagacacacagcaagtaagtcatccagctagaacctaaagtcaggtccatctatcctccaagttcctagagacacacagcaagtaagtcatccagctagaacctaaagtcaggtccatctaccctccaagttcctagagacacacagcaagtaagtcatccagctagaacctaaagtcaggtccatctaccctccaagtttctgccccctcccttgcctctccccaggcttgaatctgcccacactgaggggtggggtcagttttcttctctgggactcagcctctccatacacaggctgtgcttaatgacatttaagatgtgagtttgactctcaggtctgccactcaccatcggagagaccttggataagctgccaacttcaacctctgattgctcatctgtacagtggggacaacagtatcatggggctcttgggctcttgtgagggtgaaaggaggatgtgtcaatagcacttaaagcagccagtacggagcggatgttctgctcccatcattcctgataaaccacatccctccagctttgatgcagcaggttctcctgggcatcctcctctccctgcacctggctcgttaaactctcacataaggaggagggtagaaggggctgtttgctgaacacctattatgcctcagacatttccacattccatcacatcctcacaacaagaaaacctgtggtgtggatctcacaatgcgtcctcagatggagaaggcagcagaagttcagagaggccccagccacccagggagggaggaagaaccgagacccatccctcagatcctgaagctgcagccccaccacactcccctctggacccacagcctcactttccttctcctccctgtctcctcttcccgaggcagcacaaggggtctgactggcgggtgcaagcgactcctggtgccctatgtggaagcccctgcccagttggtgatagccagtgcgcagggtcaccaagcacttggccacatctcaggctggcttcttgcatggtggccagaggacatgagtggagtctattcattgccaccctgggaatctgggagcccaggagtgagcgtctacttcatccccaaggccaaagcctcactccaactgctctctttcctcatttttcatttcctccttctcctcctaacctctgcctctataagctcttggtaataaccttcgaatacacagagactcttagagagggagtacaatggctcccgtggctggaagtcagcaagcactggaagagcagaggacaggggcctctcctgactgttattcaccagagggaagttggggcagtgagagtagagacactcatggataatcctcattaagccattgatgtctgatatccttcaccccctgagtctactgttgcctcaagagcaaatagttcctgcatttgcctttcctctccttccgcagcctcctttacacacacacacacacacacacacacacacacacacatagaaggccaggagcagccttcccccttagtcctggagaaccttgccataaagctcaccctctcctgggctcagtgatgcaccaatcatggtgctggccctgtgggcagcagtcccgggggtgggtaccatggctcagccaggctcacttcagcttagatcccgacgccactgcttcctcactgtgtgacaactgatggatacttcgcctctctgagcacctgagtcattctgaagacaggaggatgctgctagcttttatacagatgtcagggctcattccaaagctctagaatgctcccttccctgcacaccctccgtgcatgaccagtttctactgcagatctcgaggtgggcaaaaggcaaagagtaaagaaaaggaaagatttaaaacaaccagtcctcaaatcactccattaggtaggattcaggaagcacaggctggaagacagaaaagttaagaaacaaagccagcatttctgaagggctgtctactaccaggccccattgtaaacccttgacacaaatcaacacctgattctccccaccattctgccattagatgcaattcctgcccccaccttacagagaaggaaacagaggctgggagaagttaagtcactcgcacaaaggcacacaggtagaaagtggcagagcacagcctgatcccaggcaatccgactccaggcatgtgccccagccatgagctgcgctgcgcctgggcttctcctccctgttctgcttcatgctccgagctctgtgtgcgttctctactcacctgtcagcctggaaaagtggcagcaggcaacatggatcactcaggaggacctcagtgggatgaagttccggtcctgtggtcagcatcaagtctcccaaatcacttttcatgctgccgtgtgtccagcgtggatgtccacaccggggctgggtgggcaagcgcgtgagagactcccactgccccagccgtcgtgtttgtgcctcgctgctgcaagagggagtgaggagctgtgctcatcatctctctctctctctttctcttcttcttcctcttcctcttccttttcttccacatatctgtattgaaacatcccaatgtgccattctcagtgctgagcccttagggcttaacatgccacacacaactttgccctctttgtcctcacaatccaggttgaggggcaggtataggaacagccactcacagcagtacggcaagtaggggctaggagacctggaatactgtgggaacagaaaaggggctcccaaccagcctgctgaagagttgggagaaggcttcctggagaaagtgagcgtgaagctgaagactgaggcacaggtgggagttttccaggcagagggcaagaaagggcatgtcaggcagagggaacagcttaggcaaaggcctacaagcaagaagagttgagtgggatggtgggggagttgctcttgactcccctctttctcttgccctgacacctcctcttcactgcttctgactctatcgcctgggcccccggtcgctgtcacttctctcctagatggctggcctcttcctctgcccttacccagcctactatttgttcctcagcagccagagagattcttttaaatgcaactcaggccaggtgctatggtttatacctgtaatcacagcactttgggaggccaaggcaggtggatcacctgaggtcgggagttcaagaccagcctggccagcatggtgaaatcctgtctccactaaaaatacaaaaattagccaggcatggtggtgggcacctgtaatcccagctgcttgggaggctgaggcaggagaatcgcttgaacctgggaggcagaggttgcagtgagcggagatcacgccattgcactccagcctgggtgacaagagtgaaaccttgtctcaaaaaaaaaagaaaaaaaaaagaaaagcaactcagattgtacttcacccctgcttaaaacactccagtggttttcatctgacttggaagaaggtccacatattcctcacttggaaggtctactctctgctgacctcctgtcctccccgcttcctgcagctgccctggcctccctgctgctcctcaaacacaccaagcacattcctgcctcggggactttgtgcttgctgtgccttctctgaggaacacacttttccccacattccttccatcactgcatctggctttgggcttaaacgtcacttcctaaaacaggtctcttctgcacaccctgtgttctgtccctctccatccctcacccacctctgtcagtctccacagcatttatccctccctgatgcaatatatttattggtttatctgattattgcctgtttccgctggtggaatgtaaactctagggaggtaggaattttgtctcgcctggcacattgtaagtgctcagtacacattcgttgagttagtgactaagagaacaacaaatggttcagtgtggctggagcacagagtgaaagatgggaaatggagaagaagccacacaggaccccaagggccaggtcaacatagcactttatctgaagcacgtttggaggctggaaagggttggcaatggctctccatgtggacagagaactcagagatctggagggaacttattcaatcatttaatctggctcatgagcatttcttggtgctctggtgctggtgattcagattcaaatccaacaagattcctatgctcaacaaactcacagtccaataagggatatctgttggcataaaacaccatggagtgggtgcaaaagcaaagcaatgcaagatacagaggcagcagtgatgtactctgtctggggacccctgagtaggcaaactctgaggtgggttttgaaggatgaataggagtttgccaaacaaagtttggtctcctaatgcacctcaaagagccaatgtcaaggaaatggagacattgaaaacttcatgtgttatggctggaatgtaaaagggtacagtgttatggaaaaaaaattttgatgggttcctcaaaatgttaaacatagaattacgatatgacccagcaatttcactcctacatatacacccagaataattgaaaataaggactcagacacttgtacaccaatgtttatagcatcattatcatcatcatcatcaccattaatttagagacagtgtttcactctatcacccaggctggagtgtagtaatgtgatcacagttccctgtaagccagcttatttatttatttatttatttatttattttagggacagggtctcattatgttgcccaggctggtcccaaactcctggccccaagtgatcctcccatttcagcctcccaaagtgctaggactgcaagtgtgatcaccatgcccagcctataccagcattattcacaatcagcaaaagttaaaaacaacctgagtgttcatcaacaaaaaaatagataaacaacatgtggcagatgcacatgcaacaaataattatttagttatataaaggaatgaagtttggatcatgctacagaatgggcaaaccttgaaaacattacgctaagcgaaataaaccagacacaaaaggacaaatactgtacgattccacttctatgaggtacctagaacaggaaaattcatagagagaaaaagcagagtaaagtttaccaagagctaggcggagggggaagtggggagttattgcttaaattgcacggagtttctgcttggggtgatgaaaacattctggtgtagatagtggtaatggatgcaacagcattatgaagccacagaactacccattcccaaagggcaaaacttcaccttctctcctattttgcctcagctggcagcacaacttccacactctgagctgatagttgttgtccgtctacttgatgcccatcactctgctagttcgtctctatgtattattatcccatttaatcctcacagcaaatcaacaaggtaggtgctatttttgccttcatctgccagaggaagaaactgaactcagagaggtggccacttgcctgaggtcatacagctcataaatggaatagaccccaagttcctctgactgtaaagaccatgctttgcactactacctcacagaggcaagctgaaacccaaaagcagcaaatgcatacatgctattatccactgagagtcaccctgtgccaggcagaatgctaagaacagggatacatgatctttagtaacttctcagcagcccagttaggcaggcactgtaagttctactttgcagatgaagaaacagacactgagaggtgaaatgacttcctaagtagcgcagcaggacacggacagagtcaggactcacatcaagatctgtatagctccaaagtctgtgcccctttctgctttgtcacatccacccatgatgctcctctgtccttcctagacttctgggaccaagacctgaacaagaatttgaccagcacatggtaaggagggacacctgtttactgagtacctactatgttctgggtccggactacaggcttcacatttatgaccacgtgtctggaacatgtgcctgacctctgctgccagtcgaacaagaggtcagtggcaggattggatgcctggtctagacttcactgggtaataatgtgaactgtttttagccccctgcacaaaagagaaaaaccttacatctcacatcactaaaatctaatcacagcctccactcatcaagtctctgctaggtgccaggcacatctcctaaactgtctcatttaaccctcacaacaactctaggaggtaaatatcattagctccactttgcggatgaggaaaccgagctgagggctcaatcacctgtctgaggttacacagaatgtgatacagctaggttataaacctcggtctgtctgcctcaaaagccagggctcttttcactcatcaagctacctctcaaaagccaccatctcctaattcctcagcagcagcctgggcatcagcaagaggacagacctgcccggagattctgggtatttgatctgaaatgagacccttcatttaagacctgctcctcatcatcccatgagccccataatatacatcattcctaataatagctctttatgccaggtgagtttctttttgccaaaggaggagattaaactgattttttctcagtcataaatcttacagtttctcctaaatcctattgagctgacaaattgtggccttttctgtattcattccacaagacacctggagtatgtattataggccaggttctctactaaacactgagctgcatggctaagatgacccagttcctgccctctggggatcacaagctggcagggatgataggaagtaaacagtactttcagtgatttcagcaccacctggacggggctgagatagaggtgtggatatacagaagtacccaagccagtctgttcaatatgggaagtcatcctggagctagagaccaaggctgggttttgaaggatgagtaggagagctccatggtgaccagaaagagttctgtgcagctgaaagaaatcatccaggctttttaaagcaaaagttgatttaacacaggggataaggaactctaaaaggtgctagcggagggaaggcgctggaggagtcaacagggcctctgtaaatgactcccagaatactacctgaccaaccagccatgcaatcagaaagccaggcaaatgggagaccacccctgcaaatagtgagttcaagaacttactgtcacacttgggtccagggatctggaagctgggactggggagccaccatgacgtcatcacaactgcctctcaacacccatggaggtggccaccagactctgagatgctgctgcaaaaacccccatgccatcatgatggctcctgctggaggaaagagccacagcagcagagagacggcctctgtttcaattccagagtcaaaatctcacacagcctagataattgacagaacataattgacatcgagaactttagccgcaagggaggctggggaaaatagttttcaactcctatctctgcaatatgggaaagtgtaccaaggagaagagggggagtggatgggaatgggggctgaggcccaagcacgcgtatcccccacaactgggaaggaaaggagtgagtgccctaggccaggtggacacatatcttgaattttctcttctgcctccacccagaggccctttttcaggtcaacactccacaggtgatataaggaccacccacaaagaccccttccctgtggccctgtcagagtgggggaccagtgaatccagattctcacttctgtgatgaggaaatggaggtgcagagggaagactattgtcttaaggccacacaactccatggacaagtggggcctagaaccttgttctcccctttgtgttgtgcctgctctgccatcctcttcttcacattctgggtctggggcctggctggagatgggggtgatggctggtgtaggtgaagaattgcagtctggagaggggaaaaaaactcagcctctggtatcaattatgcctgagttctcctctgggctccactcctgctaactgtgtgactctgggcaagttactcaacctctctgagctccagttgcctcctcggtgaaacggacatggagaaaagcacagagttgtcatgagaatggcagatactaaatataatgaagattacagtaggtattcttgaaatgggagctgatgggactggttccacaatactattgttaattataaactgccattactattaatagtagccgatcctccccaaattgaagatgaaaactttttaaaggttttctatgtggtttaacctcactgctttttcttctcctacctcagtagcagcataaaaagacctgcactttaactgcttccattattctagcctgcctgcatttgccaatttctaactaaacatctaggattcctcccctcatctcacccagagacccacaagtacccacagaacaatatacacagattcacaccaaacaaacactcatacatacacctggttttgaacggacacacatatgcatggtcaaatacacagaccctcactagtactcagattcacacacaaacttatagaagcactacctcacccaaatacatatagacacacacacagagaaacaacagcagcactcatgcaaacacatccttcaacacgcacactccacaccctcccagttttgtgacacactcaggaatattaaaagttgcagagaatagaagtagctcggagccttgctcctgagttctctttaaacaactggtcagtgacaactcaggactccttggagcccttgctgaagggcctttatcagcctaaagctgagccttcagcctgggtcccatctcagataagatcattaattttccattgcagcttctctctctctctctctctctctgagtcatctttacaagcccctgaaacaatggtatttaaggagggagctttctcaacacctgaaatccctacagaaaggttgagcttccttggtaaagcatttacctgctgggggagggtgcatggagtgacatggttttcacatttgagaaaggtaagtgggagggaatatcagacaactgcagagtgcagattatcatttaaataaaatccccatggggctcgctggcagcattaaaattgctcctgcctctgtggtgctgtcacagaacagcctctctcctttattctgctttaccatagaaagaggcagtgtggtgcagtggaaataccccagggctgaatcctaggattcaagtctgatccatcatctctgggctgtgtataactaactaggcaattcacttacctctctgagtaatgatgtttttatcaatagaatacagtgattaggagcaatgaagggctccagagccagactgcctggctgggccctggactagctgtgtgatctttggcaagttgcttaatctctctgggcttcaattttcttatcagtgaagtggagtaataacttcactttcctcatagggttgttgcaagtatgatattaatacatgtaaatgcttatcacagtgcctactatatactcaatgatcaatacatgatagcaggtgcagcagtaactgtcattttgtgtttctcatattccagacaccctgctttgtcctcctcaagacctacaggatctcgtcttcatgtcccctattgtctaatctactccactcatactggctccctttctggtccttggatatgccatcttgttcccacctcagggtgtttgctcttgttgttgcttctagtcggaatgctgccctcccctaatattttcatgttttattatctcaattcattcacatctgtgctcaaatgaaacctcctcaaagaggcctccaatgatcaccttatctaaaagagaaccttatctatcatcatctatcctcttgcttggaattatgctacacatttgtgtacttgtttattctttttctcatccactagaatgtaagtttcaggaagccagaaatcttgtctttcttgtacttgactgtatatctataactcctataacagttccaggccatggaagcactcaacaaatatttatagaatgcatgaataagtaaaaatattatcacattaaatatgggtcaaaatgaaacactcactcagcttcagcctgttaatcccagacagatctcttttgggctactatataccacatatatgactctgccatatacatctgagtatctgagtcagaacttccacagccagttctgactcagagctgcctacattcttgggtgacagacatggatgaaagcagctggagaaggcatcgatgactgctgccttttccttgcccaggaagagtctagagaaagaatccaccacttttgcagaacactttaaaatagggctttatggggctgtggactcccagtaccccttctcccccacccacccccattgtagacatgatcatcctgcatcacctatctgcccagtgtttccagctagcaagaaatgccaagtggggacatctggaaaaaggaatattagctttggattccaagagatggcaaaatgaagatgtcactaatagtcagtgaaaagctggctcattcttcctctctttattcacttcccctgggctccattttctgcctcagcacctgcgccgcctcatgctcggtagcaggaatttgcttttcagcaccacggacagcgattggctggcagccggggaggcgaggaagccagaacgtgggacattcatgcaaccaaacaaatatttactgagcacatcctgggggcaggcatactgaagaatacagagatttatgtggtcttgacctttaaatcacttaatctcttcgagtcatcaatattcctaaactgatacagctggggcaaggccccgagcctcctgatacttggaaagtgtggagaatcaaagggaaaatgtttcccttctcaacagttgttaaatttatgctgtgtatttgcatatgttatctaatactctcattagactgtcaccctaaaaacaaacaaaaaagcagaaaacaggtactgcaatgttgtattcaccattataccgcaagtacccagcacggtgcctggcccatagtagacactcaataggtttttaataaatgtgtggatgaatgaatcctcacaaaatcctattttacccatttttattttacccctatttcatagatgagaaaactgggtctctgagaactcccttctcgtgacagctattaagcggcagagcttaggtttgaatccaggacctcctaatttcatgctgtgctgtcaagcagagccacttaactatgcgctgggcactctcggagcctagaaaaggtgccagcttgggagaggctgattctaacaatagcactgactcactattcaaccttgagggaatcatgtttttctttctggcctcaactttgccatatgtaaaatggaaaaggagattgtgtggctaatgggtcccctccccaccccacaaatggcttataaggggctccccggaaggcttggatcatgcgtttgttgcagctggaccacgcgaccagcagggggcgctataaaatgaattaaaacatccttcccttgcctccgcagggcgtcaaatgagaagcgtattgatatcccagcagacctcaatatcctttttcatcttcccgctataaccagaatatgtgcgcaagcagtgcaggagctcttctttttagagtgcaaaaaatgaacttcaacccctctcgagaagtgagtaaagaggcagccctaggacacagagacagtgcagtgaggctgccgtgacttatcgcccaggaacccactgattgagtaactttggacaaagcctcgagcaaagataactgtttaagtggctgcggcagcggaaaaatcagtttggctgattgatgtcctgggtttcttgttagtgggtggcttccagccatggctctgcctcagctcccagaattactccaataagtgatttgctcatccctaactcttctgagggggtggggagagggagctgaatcagccttctcacaaccctgactgggatttaataggggactagtgggcattggtgcactgggggcaatgtggggagaggagcagatttgtcaggcttggcaaaaatatctggctcctgcctgtgggtgtggaggggaaaataaagtcagaaaagaagcgattgcagagtgaatgtctttcaattatttgaaaagaatgcaaatcaaatgtgtcacgaaggctgtttctgtaatcaaatcctagtcattgaaatctagattgaccaaagtgggtctccagattgaagagcagtaacgggggagcttgggagatttttgtcagggagccctactcagtgtaggagtcacccgggatcatcagaagggagcaggctctgcaattaaccagaccttgattcaatcgtggctctactattgactgtctgcaaggcctggatctagttgcttaatctttctgaaactcagcttcttcatttgtaagatgggagaatactaataatatatctactctttcagctctctattcttgcatattaaaccacattaacacttcgtgggataacaaagcaatcattcgattatgctcacagagtcttagatcagaaatttagacaggatataacaggtatggctgtgtctgctgcatgatgtctggggtctcagactggaaaactcaaataggtgggggttggaataacctgagactttttcacatggtcccaggcagtgttgcctcaaaggctgggttcagctacaatgccttaccttggcctctccagcaggattctaaaagctagtgttccagtgaacaggcagaagttgcatgaccttttatgacctagctttgcaagtcacatagtgtcacttccttcgcactctgttggtcaaaaccatcacaaggccactcagattgagaggaggggacatagaccccatctctaagtggaaggagtgtcaatttacagccaagtttgaaaactaccacacctaccatgcatgggtattattataattaaatgccagcagctactcctgttccctcagaggatcaaacagttcttggtgagagcttttcatcattcttagataaaatctataaattcttaccatggcctataaggcctggcatggtctgggcccgatttcttctctagcttctttctgcccatctcatctctcaaatgctttgccatttgccttccttcagcaactaaaaggcatcatgctccttcccaactgccaagtccctttgctctgctgctacctctgcctggaacactccttgcgcatttcatagcctggcaaaaattatgtatacctaggccactgcttcagggaaatcctttccaattctccagacctatgtcaggaccccccttacatgctgttagagaacccaatacttttacatcatagcactaaccacaatcactatgtaattatttaactaacagccctcctttgctccatgctcaacctgaccaccatcatgtcgactaacagacagggacccctgtctgtcttgtgttttcagcacttagcacagagtaggtgctcattaaatatttgctgaataaagagtgaacggatgattaggccaccaaggctttatgtttgggctggaatcacatttgctaatagtaattagctcacattgatcagatacctggttggctttgatgtcatcatagggcttactggtattccagggagaagtttttggtattgaaatgaggcctcctggggtatccttttgagggctgttcttctggagaggccacaatagctcccatctcagctgttacactcagtactccctgcgacagcagagaatgtagaagatgtctatctgaaccctgtaaggtgcagtaagaattttggtgtactaattcatctgagcccagcttcttttcatccaagtggtgccaacaacaccaaaagcattaaataaataattaaaccatagaattgtacacgctcaacacactctgtgtgctaggcactgtgccaggcagtaaaaatactgtgagaatgagggcagacatattccctgttctcctgggccttagagtcaaatggggagaaagattcaaagcacataactggagaacagtaaaagttacataatacaggcatcccaaggacctgtgagaagagagggatggcaacaatcctacctatgataggctggggggtagttaaggagggctttattgagaaggtgatatccaaacaaagatcttaagaatgtataggcagtattagagaaggtgacaaaaaggagctccaagaatgggaatagcgaaaagcattgaaggagaaaaatagcatggctttgtcaatgaagtgcagaaagtgagtgagaaagagaggcacaagatgaggctacagagcaggcagaagccctagaattaaggacaaactcttggccttgttagggagcctgtattttatcctgagagctatgggaaggcactgaagcattttgagcatggaggtgataggcttcaatgtggagaacaggttatacgggaagacactagaagctggaaaccagctggaaggctgatcattgtccacacaggaggtaatggtggcctgtacttgagaggcatggtggaataggaagaaattgacatgttccagggatgcttgggaagaataataatgattcattttaaattgaggaatagaggagagagaagagtcaaggagacctccagagttctgtcttgagcacctggatggaagaggagtcagagtctcaagaataaaaacaggttttggcaggggaaggtgatgcactcaccttttcatgtattgggctggaggtgcctatgaacacccatgtggaaatgttatgctggacctggaatatcctggtcctggaattccctaaggatctggctttatttagggagcagccagagttatgaggagagggtttcattttggccaagagccttcttaaaactcaaaacctgaccaaatcttctgagttctcaaatccaatcagcttccaccaggatcagctcaagatgcagacaatctcctggcatgtgtctgccctgtggtataagagaacaaagtataaagaatcagacactaagggctctcattagaactgggaactgagttctctcccagtagatgcatttaggcacgagctttagagagctgttgtacaggagactcaagtacgggataaggaatcagagcaggcgacctttaaatatccttagagccttgacctctacttattgtaattctgtatctgccacttaaaaaaaaaaaactaaaaaactaagtagctcattacctcacttgcctcatctgcagaagagggtgtagagtatgatttcaaaggactcttctagtgtggtaactacaactgttttgtcaacagcctcatgttgatagatcccaagggcccttctcagttcttatcttgactgatcccctacaagtattctacgctgttaattactctcttgactcactctctttctggggctttcatgacaaagaactcgcctgtgtctctaagcactcctctcattctcttccacaggctcctcttcctacctatcttttaaaacaggcttctcttttcttctctctcgacacattcttattccacaatctcattcaccaccatggctgccatgctcacgagaggcgtacatattactcagaactcttttacgagacctgatctcacctagtttaggaaataaaaaaagtattggcacaagtgattgagaagtctggagaccaagcacagattgaccatgggctcaaacaatatcccctagactggctagggattctcagcatcctcagctctggatgctcacctgctgatgtatgtctccctctctctctctctctctctctctctctctctctctctctctctctgccacttaccttcaggaggcagctgaagaaggggatctaataaagtagtctatgtattcctgggcttatccctgaaataagcatatatgcatccaatcctaaacatataccaaagactttgagaactgaactagagaacagacaaccaccaagatcccaggctggccaatggacagtaaatatgcagaatatatctgactagcaccagaaatcctttgaaaactaaactgataatgaaactgtagcccacagaaagtagatcaaaacttgttgcccaaaactaagtgggtcaacttcctggctaaaaataataataacaatcagcattctatataggatttaaacaaatatgagacccagagtctcataccatgatattccaatggccaggatacaataaaaaagtactccacatataaagaatcaagaaaaagtttaacaatttcaggtaaaaaacacaacagatgccaatggcaagagtgtctagatattgaaatgattaaacaaagactttaaggtaagtattataatccaagaaggcaaacagcgttgaaatgaatgaaaagctgagaagcctcagtagaaaaatagaagctataaagaagaaccaaattaaatttgagaattgagaaacacaataaccaaaattttaaaatgtggttacttgataatagcacagtggaaataacagagtgaaaaataactgttttcagtgaacttgaaaacagattaatggaaattatccaatcaaaaaaatggaaaaaatgaacagagcctcagtaacctacggggcaatacagaaaggtctactttcatgttattggtgtcccagaaggacagagaaaagcatgtggtacagaaaaaagaagtattaaaaatataatggctgtaaaattcccatagtttgtgtaacacacaaacttgattcaagaaaataagcaaatcctaacagaataaatggagaaatccacgctcaagcatattataataaaaattgctgaatgtttaagacaaataaaaaaatcttgactggacacagtggctcatgcctgtaatcccagcactttggaaggctgaggtaggagaatcacttgaggccaggagtttgagcccagactgggtaatataaggagactctacttctacagaaaaattaaaaattagctgagtgtggtgatgcatgcctgtagccctagctacttgggaggctgagatgggaagatcatttgagcccaggaggtcaagactacagtgagctatgatcatgccactgcactctagccagggcaacagagcaagactctgagtctaaaaaataagtcatctcaaaagcagccagagaaaaataatgtatgacatatagagaaacaattatccaaatgactgcagatttctcattaggaatcatggaggccaagaggaggtataacaacattttaaagagataaaagaattgtcaatccaaaatgctatatccagcaaaactatccctcaggagtgacaacaaaataaaggcattcttggatgaaggcaaactaagattttgtcaccagaatacctgttctaaaagaactattagaagttcttcagaaggaaaggaaataataccagaaggaaacttggaacatgagcgctgaagaaggagcaataagaatggtaaatatctgcataaatagattgtctttctcctcttaactttaaaataagccaggcacagcggctcatgccttcaatcccagcactttgggaggccaaggcgggtggatggtttgaggccaggagttagagatcagcctggccaacatggagaaaccccatctctactaaaaataaaatacaaaaattagccaggtgtggtggagcatgcctgtaatcccagctactcaggaggctgaggcacgagaatctcttgaacccgggaggcggaggttgtggtgaaccgagatcttgcccctgccctccagtttgggcaacagagagagactctgtctcaaaaaaaaaaaaaaaaaagaaagaaagaaagaaagaaagaaaggaaaaagaaaaaaagaaatgacagttgaaagcaaaaagttgttataacgttgtttggctgggttacatacagaggtagtatgtatgagaaatacattataataggaggacccagggacccatttcatgataaggttacacgtaagaccagaagcggtaaaacattgattctagtaaattgtaaagtcatgtatgtatattataatccctagagcaaccactaaaaactatatacaaagagatatagtaaaatcacaatagaaaatttttaatggaatactaaaaagtattcaaatactccaaaagaagccaggaaagggaaaatgcagcaaagaaaaacagagttgaaaaaaaaaaacccataaaatagtagacctaaattcaaacttatcaataattacagtaaaggaaagttgtctaaacataccacacaccagttaaaggacagagattgccagatttggaccaaaaaaaagaaaaaaacaagattcaactataagtgtctacaagaattccatttttaatataaggacataggtagttaaaagtaaaaggatgaaaaataatacaccatggaaatactaataaaaagaaaagtcactggagcggctctgttaatatcagacaaagtagactttagagaaaagaaaattaccaaagatcaagagggttttaaataatgaaaaagcatcaatcacaaagaagtcataacactcttaagaagtatgtatctaacaacagactttcaaaatatgtgatgcaaaaactgctagaactgaaaagagaaatgagcaagcccacaattagagttggaggtgtgaacgctactcactcaggagctgacaggacaagtacagagagaatagcaagaacagagaagaactggacaacaccatcagtgaactcatctaattgacatttgcagaatactccattcaagcacagcagaattcacattcttttcaaatgttgaaggaacagtcaccaaaatagatcatattctgtgccataaaacaaaccctaacagtttaaaagagtaaatcatcctaagaatgtctctgaacataatggaattaaattaaaaattaacataggaaaattatctggcaaattcccctaacacttagaaatttcttaaaaagacctttctaaataatccataagtcagtgtggaagtcttgagggaaattacaaaatttttaactgaaagaaaatgaaaatacatctcaaagtttgtgggatgcggctaatgcagtgttcagaagaaaagtgtatatcattaaataattacatttgaaaagaaggagagtgtcaaatcaacaatctaagattccactttaaagaactagaaaaaggagcaaaataaacccaaagcaatcagaagaaaggaaataataaagataaggccagaaatcaatgaaattgaaaacagaaaaataatacagaaaatcaatcaaaccaaaagctgtttctgtgaaaagatcaataaaattgataaacctctagccagactaactaagaaaaatagagagaagacacaaattaccaatctctagagtaaaagtattggaatattactacagaccacacagacataaatggataataaaaaatactatgaacaaatctatccacttaaatttgacaacttagctgaaatgggcctatttcttgaaagccacaaactatcaagactcacccaagaagaaatagatgacctaaatattcccatgtccattacaaaaccaaattaatattaatagttaaaaacattcaataatataactccaaactcatacatatggtttcaacaaaatatcagcaaatcatgtacagtcatgcaccacgtaacaaccttttggtcaataatggaccaagtatacaacggtggtctcataagattatagagacgaaaaattcctattactagtggtgttatagccatcctaatgtcatagtgaaacaccttactaacatgtttgtgtggatgctggcataaacaagcctatagcactgccaatcatattaaagtatagcagtacaattatgtacagtacataacatgtggtaatgataataaaagactatgttattggtgtacatgttcattatgctatatttttaatccttattttaaagtgcacttctactacttatttttaaaaagttaactttaggccgggcgcgatggctcatgcctgtgatcccagcactttgggaggccgaggagggcggatcacgaggtcaggagattgagaccatcctggctaacatggtgaaaccccgtctctactaaaaatacaaaaaattagccgggcttggtggcggcgcctgtagtcccagctactcgggaggctgaggcgggagaatggcgtgaacccgggaggctgagcttgcagtgagcccagatcgcgccactgcactccagcctgggcgacagagcgagactccgtctcaaaataaataaataaataaataaataaataaataaataaataaataaataaatataaaaaatttactttaaaacagcctcaggcaaatctttcaggaagtattatagaagaaggcactgttatcgtaggagatgacagctccacacgtgttattgcccctgaacacctcccgctgcaacaagatgcggaagtggaagacagtgacactgatgatcgtgaccatgtgtagccctaggctaatataggtgctatgttttaatttttaacaaaaaagttttaaaaaataaaaattttaaaaaagtgaatagaatgaaaatataaagaaagaaaatatttttgcacaaacgtgcgatgtgttttaggctgttatttcaaaagagtcaaaaagttttttaaattaaaaaggctataggctgggcgcagtggctcacgcctgtaatcccaacactttgggaggctgaggcggagggatcacctgaggtcgggaattcgagaccaggatgaccaacatggagaaaccctgtctctactaaaaatacaaaaaattagccaagcgtggtggcacatgcctctaatcccagctactctggaggttgagacaggagaatcgcttgaacccgggaggaggttgcagtgagccaagatcgcgccattgcactccagcctgggcaacaagagtgaaagtccatctcaaaaataaaaaataaataaaaataaaaagtttatgttacagtgagctaagggttaattaattatggaagaaagaaaaatgatttttataaatttcgtagcctaagtgtatagtgtttacaaagttcacagtcatgtgcagtaatgccattcacattcacattcactgaacactcactcactgactcacccagagcaacttacagtcctgcaagctccattcatgagaagtgccctatacaggtgtatttttttttaatcttttatactctatttttacagtaccttttttatgtttagaaatatttagatacacaaacaccattgtgttaaaactgcctgcagcattcagtacagtaacatattatacaggtttgtagcctcagagcaataaactataccatacataatagtgtgcagtaggctataccaccaagatatatgtaagtacactctatgatgttcacacaatgatgaaatcacctaacagcacatttctcagaacgtatcctcattgttaagtgatacatgactgtgtacgtatggatatgcaaatcacacacacacatacatgcacacacccacccatgcaaacacacacacacatacaaaatatatgtcttggccaagtgaggtttatcttgggagtacaataacagttcaacacttgaaaatcaacgtaatctaacatattaacatagtaaggaaggaaaccaaataatcttattaattgatgcagaaaatgcacctaaccacactcaatattcatctatgtttttttttaaatgtctctcagcaaactaggattaaaaggcagcttccttaacctaataaagggcatcttcaaaaagcctacaactaacattatacttaatggtgcaagagggagcttttcctctgagattgggacccaggaaaggaggtccactatcaccactccttttccacattgtactgcaggtcttagccactgcaataagtcacgaaaagaaataaaaggcatacagataggaaagtaagaaataaaactgtccctattcccagacaatatataggaaattccaaggaatctaaaaacaaaaaaagaatgaataggtaagtttagcaaggtcacagaatacaaggtcaatgcataaaaattaatcatatttttgtataccatcaatgaacaattagaaacgggaaatttaaaaatggtaccatttacaacaaacccccaaattgtaaaatattttggtataaaactaataaaacatatatggaatctatatgctgaaaactacaaaacactgataaaagacctaaataaacagagagacataccatactcattgattgaaagactcaacatagttaagatgtcaattctcccaaactaatgcaattctaatcataatcacagcaggaatttttcagtagatgtagacaaactgattctaaaatttatatgtataggcaaaggaattagaagagcctaaataattttgatgattaaaataatgttagagggcctacaccacccaattttaacatttgctataaaggtacagtaataaaatcaatgaggtattaacaaaaagacagacccataacagtgggacagaacagagagtacagaaagagacacataaacatggtcaattgctttttgacaaagttgcaaaagcaattcaatggaaaaaagtctcttcaacaaatagtgttggaacaattgaacacctatgtgaaaaaaaagctgaacctcaacttatacatcatgccttacataaaattaactcaaaattatcacaaatggaacatttgagacaaaatctctaaaaacaggagaaatcttcatgtcctttggttaggcacagaattcatagatatgacaccaaaagcataatccactaaaatttttttataaattgggctttatcaaaatttaaaatgtttgctctgctaacagagtgagaacacaagctacctgtggggacaaaatatttgcaagaaatatattttacaaaggacttgtcttcagaatattcaaagaactctcaaaaatcaagaagaaggcaaaaaatttaaacagccactttaccaaagaagatacatgagttaacaaataagcacatgaagaaatgttcgacatcattagcccttatggaaatgcaaattaaagccaagatgaaaccatcacatgcctattagaatggctaaaattaagaagggaaaatcaaatatcatgtactgataaggatggaaagcaactggaactctcatatattgttggttggaaggaaaatggtacagtcactctgtcctttaataattgataagcaaattgtggattattgacacaatgcaataaaaaagaacaaacttgatacacacaacagtatggatgtatttcagagtcattatgctgaacaaaacatatcagtattaaaaggttacataccatataaattcatttatatgacatcaatatggcaaaactatagggacagagaatagattactggtttccaagaactagcggttagggaaggtttgtctctgaaggggtagcataaaaagtgttcagaagatcatggtaccattttgtattcgattcttgtcatggctatgtgactatttgatatgttaaaatttataaaacagtataccaacaagccgatgtcacactatgtaagcttttttaaaacccaatgatagaaaatggtagaggaatgtttacaaagttctgaatgcaaatcccagaattgtatagctagccaagttttcatttgtatataatagcaaatcagagacatcctcaagaatgcatgagctcaaggaacgtagcagcaatgagccattcttgaaaaaaaagttcctatttaggaaatccagccaataaagagataagtcaaaataaagatttcaggaaacaaaaggcctggtggtgtgcactgaatgtacttaaatacataattaagattaaacagctccagtaataattatgattgccaaaaaatgttgacaatataaaaataattaccagcttggacaacatagtgagaccttgtctctacaagaaaaaaagatgagaaaaagctgggtgtggtggcatgcacctgtggtcccagccacctacttggaaggctgaggtaagaggatcacttgagcccaggaggtcaaggctgcagtgagccatgatcacaccacagcactccaacctgggtgacagagagagagtatctatatctattgtctaatagtaataataataataattaacagaaattgacaagttggggaagagaaaataaaaataattataagggtgctaatatcatcgtatctcttaatagggaatactccatactctctagaataaaaatataattaaaaactatgccaatctcttgtgttttataatttttttccttaagcttaaaaggatcttttgaaaaagtttttattttgaaataacttagaacagttgaagaattacagaaagttgaaaatgcagtacaaagaattcagtatgcccttcatcacttcccctaatgttaacaatttacatgaccatagtaaaattatcagaaccaggaaatcaacattgacacagtaccattaactaaactacagatcttattaaaatattgccaaatctcccatggatgtctgttttctggcctagaatccaatccaggatcctacattgcatttcattgtcctatctccttagtaaatttcttagagaaatatcaggaaatagtaactcttgggtaaagtctcctccaggagactttgcttctaactctttggccagaatgatcactcctaagtgcaaaagaggctgggaatgtgagtatttatcctgaagatatgaacattacagataccgagaatcatgattctttgagtaaggaagaagggaatgcatatattttgactaagcaattaacaatttctgctaaacaggcataagattaacaactccaaactatgtcagtgaatgggagctacagacaagtgggtacatttgagatatttaggaggtaagataggcagaacttggtaaatgattagctgtcggatgtagggaagagggatgaatgaagaatgtgtaccagattcctgtgttggtagaatacgtgaatagggatgctaggattggagaaaggaaatgccacctgctattttcttggagctcccagtatattgaacaatattagaaaagtgttccttaatttttaaaataataatcaaaacagctaccatctaataagcccttacaatgaactaggcatgttaccaaatgctttatatgcattatctcatttagtccttacaacaactcagttcacttaatctatttcggtcactggaatttcaccagcgcccagaacagcacccaacatatagtaggtgctctgtgaacattaaaagaagggtgaaaggaaggaaggattatcatcattttacaggtgaaaaaatctgagagtcagagaagttaaatgacttagtgagctaagcctggacatctgtagaatggaggatctcagagttcagctcagctctgtacttcttcaccatgatttaccaccttccccttgaagacatgaagctcccactccatcagagaaaatggaaccacaagaaagttagaatccttccagacaccaaatccttccacagcctccaaagtcctgggtgatctcgcctcccagtgccttgccaacccagtctcctttcgctctcctccttagtgcattaaaaccactttgcttcttgctcacaccgaggtcttctcagcctcaaagttgccctcaggctctcctctctgccctgaaaactccacccagctcctagttggatggattgttccttcttatccataactcttagaagtcttccctggccccaagactaggccaagttccctaggtacagggtctcttaaccccatggaactcttttcttttttgtttgtttgtttttttgtttgtttgagatggagtctcgcactgtcgcccaggctggagtgcagtggcgcgatctctgctcactgcaagctccgcctcccgggttcacgccattctcctgcctcagccacccgagtagctgggactacaggcgcccgccaccacgcccagctaattttttgtatttttagtagagatggtgtttcaccgtgttagccaggatggtcttgatctcctgacctcgtgatctgccggcctcggcttcccaaagtgctgggattacagacgtgagccaccacgccctgccgccatggaactcttttctacagcacttcttggagcctctgattaataagttattggcatgattatgtgtctattgactgaactcatgctagaatgtaagctccataaatgcaagggctctgtctgacttgttcactataaccccagtgttcagcacagtgcaggcagatagtggctgctcagcacatatcttatgcatgcctgatgaatggagaaatgaatgtgatggatgggtggatataatggatggatggacagacagccaaacacatggatagatgaatgctatagatgaatagatagatgctatgtgtgggtagaaggataaatggatagacagatgggttaacggctttctctagatcacttatgccagagggttctccatctcatattcccaggtttcctggctggcagccccctgctgcagtttttattactccttcctgcgctgacaaagacagcctggttggatcttacctgggcccacactgctgggaaagtggccaagagactccagatctgacttgggtatgcagcagcaggagattgtgggctgatgtggaaatatcctctcctggggagaaggtgggcccatagcaattatgcaacagaaagggctcttgaagtaaatctgtcttgcacaaacaggttagagttaaatttgacctgagcatgaatcacgctgtcagtttcccattcaaccacatcactgagctagcaacctctgtgaatgctactatttatatagatacaaatacatgtatttatacagacagaggtatgtgcgcaactgaagctttctgattaattgtatccttggagagaaagacttctttttataactcctccttttatgctcagtaaaagctggttcaaggctacagagagggaagtccttgaaggactgaggggtgcccagagtgggaggaaagatcaacaattcattcagcaaacatttcctgatgcttactctggggcaggcacttagaagtgttagtggggtggtgaagggtgtgaaaattaataacatgctttttgcccccatgttattcaaagtctggtggggctgactgacacacggaaggttagtgggtggttaaggattcagactttgaaatcaaataggtggggattcaactcccagcttcaccatgtacttgctgtgtgaccttggcaagttatttaaggtccccgagcccaatctctcatctccatgggtaacagatgcagatattatatagatatatagatagtatctacctgctagagtttttgtgagcctggaataagacagcaaatgtgaagcctgacgcagagtaaacactcaagaatcatcatcatcattgcttcatagctaacctttttcagtgtttaggacgtgccaggtacaaaaagcacttacaggtattaacccacttaatcctcaaaacaaccctcggagagtgatattattccccatcccaccccattttctcagatgaaaaagtatgacacaaagaggttaagtgatttgtccaaggtcacacctctcctaattggtggaaccaggctttgaactcataataccaacctgggtccagatggttacaagtccaccccaggttttctttagcacccttttggcatccttttcgaaactgtgctgatcctccggccagcgccttgaggacagagaggaaattgcttctttgatcattaattattgttacctgccaggtatttcatatataggagaagcagtattgtgtagtgtttatggtttgaatctatgctcttatcccacattaaagaaagaattagaaacagtagtaataagatgaacaatctaacttaaaaggcatcgtacaggggaaaggctttagctcagatcagcttctggtaccatctacgtgctacctgactttgggcaaatcaagtcctctccaatgccctttcagctactctcagcactttgcttatttaataaacacttctctggtcatccttctgagcatgtgactaatattaagtttcatataatcttatcagataggaagttagtatatccccattccgtggaagggaaaactgacacacaaagaggtcagacaacttgcctaaggtcagacagctggtcaagggcagagccaggattcaaaccaagcagtctagccccatgctcagtcttcttaaacatatgaccctgtcctatcacatgcaccctatcacattgtatccacccatcgacccacagtgggtaaatagtatcaccgccattgtacacatgaggatgctgacgctcagggaggaaagccactcacccaagtgctctgacttgtaagtggcagtgccctaagatcaaaacctcaaaaccaggtctgccatgtgttcttcccacagcagccagcaggatttttctatcagtccactttcccggtcaggtttattggcttctccttgctctcaggattaagtccaagggctttaatccagtttaacagaccttcaaagatgtggccagcaaatgtctcccaccctgtcactcaccactccccctcacactacctgagccaaactgaataacaggcagcacctaaaggtgccagactctttcccagcagaaccaaaatcctgtccttgattctgccgggaaagagaggctggcacctttgggagctgcctgttattccctcaaagagcctggcatctcctactccatagctgtccccaaattcctgtgacttccatggggctttgcctggtccactctgctgaccatgtgcgctgaccatgtcattgtctctgacatccccgtatcctcccagaccccatgtgcagcccctcactgggttccatgggcaatccaatcacggaaagttttaaacaagatctaggggtgagttcatggggaggtgctcataaggaatgggacagtggctggcgaccaaggtagccccagcatctgggacagggtctgaccgtggaagactctccatgggaaggaacaaagtggggatagagaatgcacaagcacactggcagcacccacccgtaactactcccaagtcatttcagaaccagaatacactcctctctttgtctcagtttccacattattgcaatcacatcttaacattgaagcaatggtcttgagagtctcctactccatccacccccaggagcttatcagtttatatcaacttattcttttaattcggctctctgaaaacaaatcatgcccaccccttaccctaatccaatagaaaccaaatctgtgcagtgcgacccaggcattcataatttttatctacctgctcccacctcaccccccactcctaaccattttccccgcccttttgtggttaagtgtcactggtctctcagtctcttcctcaagaaagtcttccctgctgtcattcctcaaatcaagttgggtgtccttcctctaagctcccacagcacttactttctcttatactctgaacctcgagtttttaaactccagactagtcttattatctgtgagtttttccagagtctagaatgatgcctaccatattgtaaaagagcttaatagctatggaataaatgagtgaattcaactttgaggatgcttcccacttttcactcttgtaattaacagtgagtagctccataaatatgccttttcctgtgttttagaatatttccccagaagtagggctcctgggacaaggataaagacttgtgtgtctctcactatagtgtagatgcctcactcacactttttccttactcctttctaacaaaaccctgcacatgtcacctatagagtttgggcaagatttattaaaccttcacaccattgagtgaatccctgatttaaatccaactgggatgtcctttcactccccacacccacaccatccataccagccacaccccacatatacacagagtgagggacttaggggtgatcacgtgaacaaagctagtccaatgagagtcaaccagactcaggtccaacccttctttttaattgacaaataagaattgtatatatttattgtgtacatgatattttgaaatatgtatacaattgaagctccatatccatggtttccacatcagtggatgcacccaaccatggatcaaaagtaataggaaaaaagcaataaaaaataacaatacaacaatgaaaaataatacaaataaaatatagtatatttacatagcatttacattgtatttgatactataagtggtctaaagataatttaaaatataccagagatatgtgtaggtgtcacaggatccttggggtgtcgcttttccagccagaaacctctgtggccagtggcacctttgctcaagttttgctcaggcccactggactcgttctgcccactcagcctggcaagctgtgctcggctcatgttaccagcctggatcccacacctgccaagggtaagccagccatggagtagtaaggcacgtgtgaataagcatggggtccaaccactgtgcacagccaggcatgccagctgcggcggggcaggcagctccaggcgctggcatgggtgccagctctctgcgaggctgcagctggaccaggtgtactgctagcagcttccacagctggcactggggaacatggtggcgcacagaagcttggagatgccaggaaccacagagtcccaaagaggatgtcacagccctggttcaaggagctactagatgtgggctccccaaagggctgcagctcttctccccttctcattgcctgcaatgtggcacacaaggggcatgcttcatccctgtttgtgttacaggtctttcatcaccgccatttgatgagtcccaagttcttgtcctgtgtccaggaagaatgaggtacgtggacaagtggagagtgaacaaggcgaagacgtactttactgagtgacagaacagctcagaggagcccacagtgggtagctcctctccacaggcaggtcatcccaacatctgctcagctgtcagcagacaggagacctgcagtgggtagctcctctctgcaggcaggtcaccctggcatctgcccaaatctggctgagtctggggtttttatgggcttcagaggagaggaagtgcatgctgacttgtccatggctagtcatgggtggcctagagaaaggaccataagttcttactcctgcagaactgtcagtgcagtccccaggcctcaggctgtccctgagctgaaggtggggtttcaccagggacccacccctttccactcaggagcctgtccacctcctgccaccattaacctgccatgcacggtgctcacaatggccaggctgttcatgccaaggggtgccctcaggcctgtgctgagctgccctaactgcccctctgcctccctcccatacttgtcagcacccaaagtccagagggggctgaggcagcaggaggctggcatgtcagtgctgcccccaagcacatacacacctggccaggtcatgacagcgcccaggcttggccacacctttgctccaaaattggagtgggcaccaggagcaggaagaggccaggcagtgggagcaggcacttctgagcctgtgggggtaagaggggctcccaggccgcagagaatgcagagattcctgggtccacagccatggctgggcagctgcagctgtgcctgggagggcagagctcccacccctttaacttggatgggagcagggctcctacctgttcgtggctcccaccagctccatggagtgtgcagccccagccacacctcccccactgcagctggtgtcatggcagtggccaccccagatgggttgccactgccatcataggtaatatgcaaatatagttgtccctcagtattctctgggtattggttccaggacccacctcggataccaaaatccaaggttgctcaagtcctttatataaaatggtgtagtatttgcgtatgacttatgaacatcctcccatatgctttaagtcatctctggattacttataatacctaatagaaatgcaagtgctatgaaaaatagttgttatactgtatttttatttgcatcacttttattgttgtattgttattgactgttcttttttttttaatattttttgatctgtagttggttgaatctgtggatccacagaacctgcagatatggaggactgactatactgtcattttatataaaggatttgagcaaccttaggttatgatgttctcagggatcctggaaccaataccctgaggatagggagggatgactgtacatagcagaatggctaaatcaagccatgcaacatacatatcacctcatacacagtactcgtcattttttatgctaagtgtctgtgaaaacacaatatctactctcttagcagttttcaagaatacaacacattgttattaactatggacaccatgttgtacaacagatcacttgaacctatttctcctatctaattgaaactttatatcctttgaccaacatcttccatctcctaccgtcagtcgctgctaactaccattcttctctctgtgaatttgacttttttagattccacgtgtaagtgagatcacatagtattagactttctgtgtctggcttatttcacttagcataatatcttccaagttcatccatgttgtcaaaaatgaaaagatttctttctttttcaaagctgcatggtattctattgtgtatatatactacattttctttatccattcattcttgctggacacaggttgattccatatcttggctattgtaaataatgctgcagtggatgtgtgagtgcaggtaggtatccctttggcatattaatttcatcttgtttggatgtatacccagtagtggttttaatttttgttttgctttgtgttttactatcaggaaaacacactcttctgaatggagccagaagacatagagccctggtgccagtgattacaatttggtggccacaaagggagatcctgttgctcactgaggattagccccctccccaccgagggagcagaggagagaaatacctaaagggagacatcatggtcacattgctgatggattcatcttcatttgaagctggccctacctctcagctttttaattatgtgagtcaataaattccttttcttggataagccactttaagtggcatttttgctttcactttcaaatataagcatgctagctcatgtacaacacgctgccaaattgtttttcaaaagagttgtcaacatttgcaattaggcagaaattattttgaacctattagatgagacagttgacagttgcttctgagaattcagtaattcagtatatcaggggtcacaatgactctaggatgttgactcattcagtttggaccttcaatgagctatggaatgggaagtggagcaatgtctgtcaccctcacccccactacctaaaggaccaagtaaatcttaccagatggtgctgtgaaatttttttatgtctgaaaactttaagagtaatttttgctagttttaaaaatatgaaacaactcttgttcattacagaaaaataaaaataaatctatgtttcaactatctatttttgtgtaacaaaccattccaaaatttggcagcagcttaaaataacaattttattatgctcccacattctgtgagtcaagaatttggaaagggaacgaggggggtgggcaatggcatgtatttgttccaccagggaacttcagctaagatgaccaaaggctggggttgacttgattgctgggggcaggatcatctggagatgtcctcactcacatgtctggcagtcattcaggacctcagcctgggccattggctggaatacctacatatgacctgtccatgtggcctgggcttgctcatagcatgactaccttggactccttgcaaggaagctcaagactccaaggcttgtacatcaaaataactagctaaagcctcctggcctttgatgtcctagcattcaaagtcacatagcatcacttttccagcactccagtggacatttagtcactaaggtcactgcagattcagtgggagaagacggagaccctattttttgctgaaaggagcatcaaagatcaacttgcgggcctatttttaaataccccaggattccagcaaaaagaggacaataagcaacaatgcaaccctgcccacccagagatcatcacaatcaacatcttcatgtaaacttttctggatactgctttgtcgttgatttttataaagctgaaatagttttagtggagactcttttacttgaaagtgagagaaacccaattcaaactaatgtaagcaataaaggaaatatattggctcatagaactgaaaaatctcaaggggctgtcttcaggaacaggtggatccaggagctcaataatatcatggatctgtcccattctccctcttggctttactttcccttggtttgtttcatctgaagcaggttctcccacatggtggcaaagagggatctgacagctcttagcatgcatggtttttagaacttatgcctgcagaaagagaggtgtttccctcctgagaggtttaccatcatcctaggatccttcattgacctagcttgagtcataagcccagggggtaccctaatgacatggcttgcccaggaatatcttgaagagatgaaaagctcatatccacacacagtttggttccttgcttttttcaattaactttatatttaggccagtagatacgcttccaacaatatcatttagaatgattgctttttagtcctatgtgtggatgtaccattattcatttagttaaatacctattgttgaacagttagctagttccgatttttcactgcaacaatcagcacagtatgcctttcaactaaacctttgccaacatctactacatattatttctagacatggaattgtaaagtcaaaagacaagtgtgtttttaatgcttataatgctgtttgtcaagttgtcttcaagaaaagttgtaagaatttatactcccacctacgtgatttaagatggctgatctccacttgtccatacctatactaggtattaacacttgaaaaacaaaatatgtgccaaacaaactaaataatattgtgtggttttgatttgcctcttttttttttttttttttttttgagactgagtcttgctctgtcacacaggctggaatgcagtggcgtgatctcagctccctgcaacttctgcctcctgggttcaagcgattctcctgcctcagcctcccgagtagctgggactacaggtgcatgctaccactcctggctaattttttgtatttttagtagagatggggtttcaccatgttagccaggatggtctcaatctcctgaccttgtgatctgcctgccttggcctccaaaagtgctgggattacaggtgtgagccaccgtactcggccacttttcttttattgctagtgaggctcaatgaatttcaattccttccgtacaaattgtatttcctaatagagaagcaaaacactggttagagagaactggctcaaggctcacaggcccagtcctgagagacaacagggagtaacaagtgttctaattatagtgatcatttaaataatagtagctgccacttatagagcatctactatatcaagcattgtgtccattcccatccactcatcattgtgtttcacttcctcggatgccatccattcaggttcccttttgcagatggacagcgttgctcagaccccagctttatggctataaagtcctctccatgatttctgcaaagggattttctttactgtgtcctctgcaggaatgtctctgttacatccctatctactcagcctcttcccttatctgtccaggaactccacccacactgagcattttgtgagttttgtcaacttgattaaactcttgggagctgcagtaagtaggcaagaggcttacacacactgtctgaccaatgtcattcttccccgttgcctccctctctctcatgagcaacatacattcccctcgccatctgcacagcagcatgggaatcacctttggtggttttattccctgaaagggttgggtgcatgtctctcaccctccacaagcttatcaaagtattttttccaaacatagggggaaaaaaaagagaaaacaaaatgttctctctggcttttaacatctataaataaggtagggtgctaatgctgctccattttgtagatgagaaaactgaggctggcagaaataagacaatttatccaaggtcctaagaacttctaaaggatgctgccctggcaacaagaactacctacttgccctaaacgtgcagttcatcttcttgcccccctgccttctctcctgctgtttccctgctgctcactgactgcaccacagtctccattatctcaatttctgctgcacaaaaagaccatatcctcatccttcaacccaggaaacagagctcagcatataagggtcggagaggtcagtcacacacacacacacacacacacacacacatatcgtcatcatggaatgtaaggcagttgtgaccttaagaccttaccctccagcatctccagcactcagtcttgagaacacggagacctggggaagctctggagtggggcacagctgcctgggccatgggtagagatcagcttgtaccaaggctgatgactgactcattcacccagacacgtttccattttctcagctcaggcagctcctaatgcaaagctgaaaattctcctctgcctcattgtgtgcctgctcttggaggcggggtctttgggtaggtttctgaagagcaattatgcttattactggttaggatttcagaaaccttctctgtttgctgagtgcattaattctcagctctttccatcactcatttttcctgacagccccattttgcaggtgtaaatgtgcagatggagagcaatggagaaagcctgtacaaaaaaaccaaagatggggaagagagagtcaaggatggaaagagagattcctaaggacattattggtgtccgtggcgttcccaaggcatcactgtggacgcctcaattacgtgaaccaatacatttcctcctttccttaaaccaatttgaggcgaatatctctcatatgcaatcataaggcttctgactactatgcctcttagatgtggcatgtttaaaaacaaaacaaaaatgtttttattgcattttaatttgtttttacaaaatatagactcattttaaaactgaaaccctgtaaaactgtatatgctatggatttacagctaagcataaccagtgaaacacagttacctctgtgcccctccacactctcactataatttaagagatcaaagagatgacccacaggataaggagaaggatagagaaggcaacagcaatgaaaccttagtgatgctatgcagcaaatggaccaatggaaactgacttagcagatctaagaaagctgaaacctatgcaggcagtatagaaccagaaaattcatctaatttatgctatggatccccacaaagctcaggaattggcaatgtgctgtgcctcttaaaaaaaggtacagttgaagcaagaggctctggccttgaggtgttccatcccaaaacagggaaagagctgagttacgtgaaaggtatcacttaaaggctgaggcctcattctcctctctactgtgacagactcaggcttttaccccaccagtcggaaagattccactctggggaaaatgagcagccccggagagaagacccagagatactcatagctagggcttaccctgagcaaatagcccagctattatagattaggtctttctcagccaacacctctctcttacgtatttattaatatgtacagtagctcaaaaagaaggaaggttgtaattgcatgcacggttctgccacttgctttttaaatttaattatgtactatgggtacatccatatctatccatgtcagtaattaggtgcagtggagttatatgtatgaagaataggattttcacactgtttccaagtatcaacctaagggttatttatttacagaggtgggagggtccagatctgatgaccactgcttagccaagggattgaatttagcatcaccagtgagggacaagggacaaactgatacgacatgcctttctgtgtgaggtgctaacaaggacatgacatcactccagagccattgccaccaatctaatcaggaagaagcaatcagatggatccaaagcatgagatattctcctcgactcttcaaatatgttagtgttatggggacggggggcactgggaaaaggctatggaactgctctaggttgaaggcaactacagagatatgacatctaattgtagggcgtggtcctgggttgaatcctagatgggaaagaaactagctgaaaaggacatttgggagacagttgggaaaatttgagtatagaatgtggattcaaatatagaatgtagcgaatgtatggtattagccttgaatttcctgagtatggtgcaaatgtgacaaaatgttgaaggactggtgaatctgggtgaaggatatatgggtattcattgaacttgtcttgaacttttctgaggtttatttttttaaaaaataaaaagctaggaaagaagagagttggcctctgaaatgtgctccacccaaaccatttgggcaggtgactcaacttctccaagtgtcatttcttcctctgtaaaagggagataataatagaacctacctcatgaggctgttgacttaaatgaaataatgcctgcaaagtgcgtatcatagttcctagtaaatgttaactgtcattatcatctgcctcactctctttaatggatgtataattccattgtcttcagtttctcttcatttggcagcaaaagtcatcacccagctaatgagctctgtggttttctcgtcagtgcaagacaaggtggtcacaatttgtgctgtctgctactgcttggagcaaaaagaggtcttgctctgactgttgactttggatgcctgactgtggacacctgtggtttagagcccctttccctacctccctagggaaacagaacccctttctctgtgtgtggaacacattaaatgtggttctccaccaccacagtggtagctactcacccagacctggacaaagttctctttttgcctggccatagtggttactttaaggataagcatcatctcagacagtcatctctgggagatatttgccagcacaatctggaatacccatgatgaaccagaaatacacaagtaggtgaaggctagtcctggtcccagggaatccttgggcctagaaaggggagacagacaatatgcagatccaactccccaggactccaaatcccaaaagtactccaaaagaatcaatactttttcacctctctgtcaccttcaaatgaggcaccaaaattgaacttctcagaaacttgctttatctgcaagggcaaagatttaaggttcactctgaaacacctggaggagcaattttcttccaattaccactggtttctcatcaacaccattcctcctgggggccatttatagaggggagatagtaccagatgataatgtcagggaaccggcactattaaataacttctggaaatccccaaggtttaatgataattctgttccttttaactcctaacttcttcctcttctttttttaagcactctccagttatttcgttttattgtgtttaggccatcctttgacgcaaataggacgaatatagtcatatccatctctctaatcgcagagggtggttcagttcacagaggagagcagtctctagcatcagactgcctgcattccctcttggctctgtcaatgagcagatttgtaaccagtgactctgcatctctaggcttcagttccctcatctgtaaaatgggggtaaaaagtacctaccgcataacgctgtggtaagaccaagataaaataatgaatgcaatgcaagacctggcacatagtaagtgctcaataagtatcagctttattattattatagacagtccaggggtgaaatgtagacaaacaattacaaagagctgctaggtagaagcacagcactagacaccgaggcagatccaaagaaaattgtccctgctctcaaggctctcacaactaagttggggaaagagaaaaaatgcaggggtaaacaaaacaaaaatgaaagcaattagaaaagagtcccctgtaagggatgttcaaggtgacttcaatagttagacacacagtagaggcatttgggtgaaatccgcaaggcaaggacagcaaccagttcatctctgtggctgggcatcagcatagaatcaagcccaaggagatgctcaggtgagtggctatataaatgcttaagtgttcagaatgggaaaatgtgttaaaagacacacatggtttgagaagtgtcttgccacattctcacggcgaagtaatgttagagggtcatagagctggcctgatctagaatccaggtctgcctgacatcaaagctcccaatctttcaatgacatcctgttgccttcattgatttatctctaaatctctacaaattctgaagtataataggtgtccactccatattgatggagaggatggaaggataagtagatggtgtttggtgaagagagagattgactgatggtgaatgagtagtaggtaagtgggtggataggtggatagtagatgaatggatggacagtggatagatgcgtaaggaatggtcggtggataggtggatagtagatgaatggatggacagtggatagatgcataaggaatggtgggtggataggtggatagtagatgaatggatggacagtggatagatgcgtaaggaatggtgggtggataggtggatagtagatgaatggatggacagtggatagatgatgcgtaaggaatggtgggtggataggtggatagtagatgaatggatggacagtgaatagatgcataaggaatggtgggtggatgaattgtaggtggatggctagttgagagatgagtggatggtggggacatgggtggatggtgggtagatggtcaaaggcacaaaattggatggacagtagaccagagtaaagtgggaataaagaagcagccacatatagtcaggtacttaagagcccagttatctcttgttaaaataacagctacttaatgctattcaataagtactataattcaataagtgcttatgtgccagagcctgtgctaagctctttacagagatcacctcctccaatcctcagaaaaatcccaaggtcgttattattatacccataagggaactggagcttaaggaggcaagtctccaagttgcttggcaagtagtaggcagattcagtgctcagactcaaactgctcaaaactccagattgctcttaacgtttgtgccaaatagcagtgactgaccttcttcttcccagcagaagttcataatacaaatcaggaatcaggaaatatttcccagggaaggagacacctgagccgagtcttaaacaccaacagaagaaagggctttcaaggcagaaagaacagagagcctggcaccaagacatgtaagaatggggccaaaatgaagacaaggctggacaggtaggctgggagcaaatcatggaggcccttgggtgccacatatagaacaattaataacaatattgtgagtcgagaatgctgccaagtccgtttacttgtattatctcatctaattctctcaactatctgagaataactgctactatgaacccattttgcagctgaggacactgatcctccaaaagattctgtaccttgctgaatgtcacacagctagtaagtggcaaagccacgacatgagcccaggtctctctgactccatactccatgctcttaaccaccaagctgtactgccctatgtcagcttgaactttatccattccacaagggtttggattcattctgtctagtgggaagccatcaaaatctttgaatcagcaataatctgataaagtgtgtgctattagaagtatcctctccgatgactctggaagttggacagaggaagacaaggctggtgtcttttgtaagcccccctttgactggcctcttctgcaagcctgcctttgcccagatagcctgcatccctccttccagaccctggagcccattcactaaatgggaggccaagatctgctgtgtgatcttaagcaggacctgaccctcgctgggcctcagctttcttaggtgaaataagaagagactgggctcacacatccttaagaatctctccagctctgacattatagcttccctctgatgttctctgggactgtgcagctaaatgtaccacttttagccacttagcctcaggaaagttgacatctgcatttttttctcactaccatgaattttcgatggctcttcctcccaatataaaagagttatttttggctactgttcaatataaagcttttgttctcccagccctcagatgtcatcatcagcttgtctctgcagaatcctcttcaagacacctttgccttccagagccacagctccaagggggaagctatttgcaagcccctgacagtgtgtaatcactgattgcgtgtagctgaggagttgtcaacaagtagcatgatgccgggggttggctcttgaaatgccagtagaggtgtcaactgccacttgctggagacactggagaaggtttgcattccatttaaatgtggcccaagaactaaactggggagaggggagactaactgtaaacaaaatggggaacatgacctccggccctgccctgaaaagtattcaggttggactggtcctgccagtgctgatggaagggcaggcactattgtgagcagtgggcaatatagtgtggtatttgtaggtgtggatgttaaagccagactgcctgggttcaaagcccagctccaatccttacgggagctgcaaccttgggcaaattatttaacatctcagtgcttcagtttccccatctggaaaatggggatattgtgggtttaagtgaggcgttgtgtgtgacatcattagaacagtaccaagcacatagtaaatgctcaataagatattggctgctattattattaggactctaggggcagtgagaggccccactgacctgaagaagtaagcatgccataaggtagtagtccaaattgtggtccacaggttcaccagggaacttactagaaatgcaaattctcacaccccatccagccccactgaattagaatctctggtggtgggagccataaatctggattttaatgagccctctgggtgatgtgatgccagaggcatccctccatccctcctaaaccactcctcatgggccacttccctcagagggagaaagacggcagcactggctgtgggacatacaatggatctttttctttacctgtgcctcactttttccgctgtaaaatgaggtaaaaatacagggctgttgttaggagtcaatgaaataagggataggacaagctgaatatcccatcccatctctgttttatcttctcagaagaccttaggaaaatgtccctagaatgagaggcaggccccagcagactcaacaaccggcccagccatctgtaaacgtgggggcagggggcttcagacttggtgaccaagggagggaaaacgggtagggatcaccaggacttaaatcttggctttggcagagcaacagaggcaatttacttcacccccctgagactttctgtaaaatgaaaacaatcatagttccattcagggttgttaagacaactaaatgaaatctcttgcccaagagaaccttattaagcacctacccgtgcaggctgtgttctggccctgaaggtacagtagtgaataagacatgctacctgccatggcagagctgacgctctaatgaggcagacacatattcaatacctcattataaaattaattatcttgttacaattgtgatagatacatggtgacctaacagggacccacctaaactgggaggttaaggaagggtgaaggcatgacggtcaagagcaagaattcagtgggcagagttggaaggtcaggggtgatattcagttagaagcaatagcacatatgaaagatgggaatgagcatcagcaattgcaggacttttttttttttttttttgagacagagtcatgctctgtcatgctctgtcgcccaggctggagtgcagtgctccagcctggatcactgcaacctctgtcgcccaggttcaagtgatccttgtacctcagccacccaagtagctggaattacaggcgtacaccgccatgtccggctaatatttatatttttaggagagacagggttttgccatgttggccagctggtctcgaactccagacctcaagtgatttgcctgcctcggcctcctaaaatgttgggattacaagcatgagccactgcacccagctgacaattgccaaatcttcaaggccaccttgagaattttgagcaataagaagcaatcagaggattttcaataggggagtggcatgactaaatttgaattgttaaaaaaacattcctgggatgggtgcagtggctcaatgtctgtaatcccagaactttgggaggccaaggtgggtggatcacctgaggtcaggagatcgagacaagcctggccaacatggcaaaaccccgtctctactaaaaatacaaaaattggccaggtgtggtggtgagagcctgtagtcccagctacttgggaggctgaggcaggagaatcacttgaacccgggaggcagaggttgcagtgagccaagatcatgccactgcactccggtctgggtgacagagcaagactctgtctcaaaaaaaaaaaaattcctatttttaaaaagaatcaaccatataaagggttggtgatgttatggagcaactgaaactctcatatgctgctggtggaaacacaaaatggcacagctactttgaggaatagtttggcagttttgtatgaagttagaaataccctgaaaccagcaatcccacttctaagtatttactcaactgaaattaaatgtatgttcatgtaactgagtaccctcatttttctaagagataatttaataattttttctctgtctcttcttttctccttttccctacttcctacttagccctttagaaatgaaaatatagctttccttccccttcaccagacactccctacaaggcaagttcacctgcaactatgtgcttaggcactccagaaaggaactctcacccgctaggaggttacctcgagaggtaacagtcaattacaacccaaagtatgcctgcccacaaaaacatcagcagtcaccagcttgacagcctggtagataaggcactaagctaacacgaagaccccctacccgctcatttccccctacccctcctcatgctgttcatgttaggtcccctttaaaagtgctcaccttctgctctaaaagtaagtggtacccttaaagcaggaagcccgtatttcttcccctaagctagctttggaataaaaaatcactttatacgagacctcactgttaactggactctgcaagtggcaagcaactgaaccagcatttcagctccattcacacacaagcacaaactggaggtaaatgtttgtattaaatagcagctttacagaaaatcaccagaaacctggaaacaattcagatgtccattgactggtgaagggataaacaaactatgtacatctattcaatgaaatactactattgagccacaaaaaggaacaaactactgatacacacaacaacacagatgaatcacgtaagaattatgctgcatgaaagaagccagactcaaaagaatcctactatgttactttatttatatggtatcttttaaaagccaaaactgtatggataggaaacagagcaatgcttgcaagggcctgggggtagaggaaggagttgcctgcaaggagcctcaggggaacttctctgggtgacagaactgtactgtttattttttaatttttaaattttaatttttaaaatcttggaattgttctaaattttgattgtggtggtggttatgtgactgcatgtgcttgtcaaaattcacaaaactatacctcaaaaaaggtgaattttacgctatatgaattgcacttgttaaaaagacaacaactttgcttcagagaggagaactgatttggttggagaccaattagaagacatttgcagataagagatgagatgacgtgtctgtactaggctgtggcagtgaggatagagaagtaggcagatccaagagctatttaggaggtaaacataatacacaaaataccatgcagcataaggctggcacctagtaggctcactctcagttgctttctctgtcagttatatgagccatttgtatcacagacaacttcccaataggtatctgcaacttctgccaatcaaagcatgctgtggccttgtagtttcagaaggggaaggagacagggacaatagtcaggcaagtgggcagaggaaacactggagacccagtagaacagaaattcataggactgcagggcagactggtattaaggcacacctgaggtatgaacaggatctcaggtgatggctgcagagagtcaaccagcccccatccatgaataaggataccaaggtaaaggtggcaagtgactctggcaggcttgtaggaggttgccatgacctctccctgaatctgctcgaattttccttctcatctgaggctttgagccccgactttaggacctcagaagagagccatgaatcgtgggttaaatttcaggactaattatttcctcaggtgacgtcaccctcaaatcttggagccagagattgaattctgtgcagtgagacctggaatgggagtcattagacctgagtcatcatcctggttctgactctgagactatgggtggcttattttcactttctaggctttgacttcttcatttgaaaaacgaacaagttgatctctaaggattcatccggctttaaaaataagggtattctacttgaaggatgtttattttagccatcctaatcctgcaacatatgtaaattttaaaagtttactgaaaggaatagagcaggataaaataaatagattaggaaattgagatgaagagaaagtaagaggaggccaagggttagaatatagacttatcatttgctagagatgtaccttatccttaacctgaagatgaaatttatgtccaagctttctagcagccaaagcaaagagatgaccaaagagatgttagggctgttcaacagaaatttcttcaatggaggaaatgtcctgcagctgcaatgttctactctagcaaccactacccacatgtggctattgagcacttgaaatgtggctggcatgactgaggactggaattttacatacttacttaattttaattaatgtaaattggagtagccacatgtggttatactggacatgcagtgttagataatttacaatgtttgttccatgtgccaattacaaacgtactgcttctcagctccaaagtctccctttattgcctggtctgcaataatagagttgggccttgtgaagattcttcctttgccaggcagcacaatgttaagctttgacatgaggggacacagaagagacactgaaggagaaaggtgtttctcttccttttcccagtgcacttctctccacaggcttttatggtttatgcatcacctggttctggaagtgcaggctgcttttgcaggttctagctccagtagcacatgtggcttctccagtgtctggcttctgcagtgcatgtggcttctgcagcacctgggtccagtcttggcttcaacttccaactcctaaaaggcaggcaccagtccctacagggtgcagcagccagcagtacccaaatgcaaacaggtttccccagaaactccttaggtgacttcagagtggaatgccacagatgaggtacctccctgtgaactgcctctggtggctcccctttgggcagatttccagcaagtttcaaggcacagcatctctgcatggatggtcctcattgggatgcaggagggaagatttcagcaagtcccgctggggcagtagcttggacactgctccactagtcagtgagccacagccatgccttctccaacaaggtctggatcacagtgtggagctcggggatcgtcctcgagcactccatctcagtcctaagagtagtgggtactcctcatacctgctattcctgcattctttacagttcttcacttcttaccagccaatcccttattatgccaattctctcctatagttaaccgtgttcatattaaactttctctgttcaaattactgtacagtttttatcccctgactagactctggctgacataggagtcgtctcaggaaatagatctgtaaagatgggacttgggcattggtttggtcatgcccttgggcttgagcacagtaatgagcttcttaccaatgggaaatgggatgctagcaattcattgcatgcagtgccaattaaacaagctacaaccaaccgaagcaagtgtccagggagcccaggaggatgctccacttgattgttacagcagtaatgatgactgtaatgactgcagtgtggaatatattcttttgagtggacttgaatgcttatagggagaaaatgccaaactcagctcaaatcatgacctgaaaaccagagaggttaaatgaatattttatttcttatagatacaaggctgatgttgctgaaaaagataacaaaaatttaattgtgtagattgccgaattatagtgtcagtcagattcacaagcttactaagttgctcaaatgaaagttgattggaaaaaaatggaatcataaaactggaaacagggacatctggttggacctagatgaagttgataatcttgaatcccaaaatcactgtgagcttctcttaccagtggaagtagcttgccctctggtgtattaggacactagcatttctttgcttgatagccctgtgacaacctcatctgaggcaaataccttgaaaaggtatggtcattcttttccaaacccaccacgaccaccttttgttgccactagacctataactagggtcaaataacagtatgctccagggagacaggtacacattatgaccttggagaaaatagcttaaacaccaaaagaattgcaaaaatttgctaatgtatatcagcattaacctgggtaacatgtgtgagtatggaattgaaaggtgttagaccaagtagggtagattataacactatagtgagcaaattcactgatgtaagtgaacttactagtgactggatttgggggagagcgtgagaatgtcatacttttaaggaggatagctctaacttgtatggacctcatgttactggaagcgtctctaactgctttcttggttgttgactaaaacttgggctcaatggtgacttacactgaatgatattgagatgccagaacttccctaaaattacacagaggaggaaattcaaaggcttagggagaccagaagttttgcctggatgtatcacatgcaatctgcccactcacctgccaactgtcttcataagaaagcccagcagacactcacttgactaaggcaatgagaaatactagctttgattatttcccaggtggaaatacttcaatcagagaatgcaaaaatgattccattgaattggaaggtgaggctgtcacttggccattttgggactctttatgccactgaatcaataagcagaaaagggcgttattctgtgggttggaatgattgatcctgattaacaagagaaaactggattgcggctgccacaaagtggggacaagaagatctatgcctggaatgcagtggattctatggatcgcctcttagtgtgtccatgcccaataataaacattaagataaaactatagcaacccgaaaaaaggcagaataattgaggactcaggccatttgagaaggaaggtttggattgccccatcaaataaggaaccccaactaactgaggctctgttggagagcaaaggaaacacaaattgggtagtagaggctaggcgtggtgattcacacctgtaatcccagcattttaggaggctgagatgggtggatcgcttgagctcaggagtttgagaccagtctgggcaacatagtgaggcccaatctctacaaaaaaattaaaaattagccaggtagagtggcatgtgcttgtagtcctagctactcgggttgctgaggtggaagatcgcttgagtctgggaggtcaaggctgcggtagctgtgactgcaccactgtgcactccagcctgggaaacagagcaagaccttgtctgaggggtgggtaacggaagaaggaagccatggatatcagctatgacctcatgacctattacagaatcaaggcctgtagcagctctgcaaatgctctctttgcttgttagaagaatgtgctaactactttattctttttcttcttatttttgttttatattatacaagtttttgaagcttaattttataatttagcctttagataacagaatattcggtggtactataacagattgaaagacaattaatatatccagcaatggatataatgactgtcaggatggtgcagtgcctcattttggggagaaggtgagaactgcttactaatgtaaggaggatagttatatcttgttagatgggaagaggaattgttttattatatgggactctaaatgtgtgtagagggtgcacatgtaagccgagtagctgtggtgacacatgctaaggtgatccccaataagtaagggctttgtatatcatcacttcccccttaaatgtagggaaacctgtgacttacttctagccaatagaatacagcaaaggtgataagatagtaactcccatgattatattatgcgatataagtctccattttcgcagatttaagccagagggtcctgtgctggcttttaagaagctgccatgtcgtgggcggagggctatgagaagacctgtgacagggccacgtggcaaggtactatgagtgacctctaggacctgagagtgacccgcagttgacaaccagcaagaaaatggggacctcagatctacaatcacagggaactgaattatgctcccaactacatgagcttggaaagggattccaagctccagaaaggaccacaacctagaagacacctggactgcaacctgatgagagcctgagcaagaaacccagctaagccaagcccagactcccaacccatgaaaactagggtcatacgtgtacgtttggttttttgttttggtttggcttggatttttttgtttgtttttaagtgtacaattcagtggtttttagtatattcacaatgatgtgcaactgtcactactatttaatcccagaatatttccatcatttcccaccaaataacaccataccttttaatttttccctgcactcttctcttggtaaccactaatttactttttgtcgctatagatttgactatgctggacattttatataaatagaatcatacaatatgtgggctgttgtggctggtttcctccacttaacatgaggttttcaaggtttatccatgttgcagcacatgttagcatttcactcattttaatggctgaataataggcctttatgagcatgccacattttgtttattcattcatcagttgatgaacatttaggttgcttccactttttgatggaacattcaatcatttgaccagtcatctacaaatttttgtgtggatacatgtttttaattctcttgggtatatacccaggagtataattgctagatcacatggcaactctctgtttaacattttgaggaattgccagatagttttccaaactggctgcatcattttacatttccaccaacaatatgtgagggttccaatttctccacatgctcaacacttgtcatccgtcttttttattacaaccaccctagtgaatgtaaagtgatatctcattataattttgaaatttgaaaatctccctaatgtctaatgatgtttagcaaccgactttgcccatttttaaattgtttctttattgttgagtggtaaaagttttttgtttgtttgttgttgttgtttgtttgtttttgtttttgtttttgagacagagtttcactcttgttatccaggctggagtgcaatgtcatgatctcggctccctgcaaccttcgcctcctagattcaagcaattctcctgcctcagcttcccaagtagctgggattacaggcacatgccaccatgcctggctaattttgtatttttagtaaagatagggttttactatgttggtcaggctggtcttgaactcctgacctcaggtgatccacccacctcggcctcccaaactgctgggactacaggtgtgagccactgcgcctggccaagagttatttctatattctgataccaggcttttatcaattacatgatttgtaaatatgttccctcattctgttggttgtcatttcactttcttaatagtatccttggccgcacaacagtttttaattttgataaagttcaacgtatccctttttaattttgcatcctgtgctcttgatatcacatttgagaaaccattgtctaattcaagatcacaaagaggtatgcctgtgtttccttctaacagttgtatagtttgagctctcatatttaggtctttcatacattttgagttaatttttgtatatagtgtgaagtgagaatccaaagtaatttttttgcctgtggatagctagttgttccagcaccatttgttgaaaagactgttattcttttctcattgagtggttttggcatcatgtcaaaaaattgattcactatagatgtatgggcttatttctggagtctcaattctattccatcaatatatatgtctatccttatgccaataccccactgttctgattactggtagctttgtagtaatgtgttttgcttgcagcctccaagtttatggtaaattgtcacatagaaagaaaagagtaaccaaaaggtagactcaatcagttatcaacatattgcctccaagctctaaacttacccttcattctctctctataataatggagctgggctctgtaaatatatctccttctcaagctttgtcagtaaagaatgctgtgggacactggagggggaagagatcctcttcctggctcctacgtgctcctccaggcaggtttctgaagcactgcatgcttttccagcactgcgtgtgggttcactagtgcagctgctccagttcaggtggcttccccagtgctgctcccccatagcatacacagcttatccagcacttgcctcctgtggtgtatgaggctcttgcagggcccagcaccagtggctcacatggcttctccagcacttggcctcagcagggtatggcttctccagtgccctagagcatgcagtggccatcagctttctcccgcacctcttggacaaatttgcagcagagtgccactgccaaggtacctccctgtgagtagctccccaggcaccctctcaggcagctttgcagtgagcactaaggcatggcatctctccatgggtggcttcacccatattccagaggacagattccccaaagtcctggtggcactgcaggtcagccacatctctgccacagccttgccctctccaacaaggtctggatctcagcctataggggaagtgtagctctttcttgggcactctatctcagccctaagggcagtgcctcctccttatactctatgattcctgtattctttaagttaaactttaaagtcggggggaggacaaaagcaccctctccaccaaaacaaacaaaaaaccagctgatcaggatatcaactgcccctgagtagctgggaactaaaggaacttctcccccaggtccccaggaaataaagtagagaacgtcttccaaaccagctccacttctgtcactagacccaagtatgcagggttcttttttgagacaaggtctccctttgtcacccagactagagtgcagtgcaatggcaccatcatagttcactgcagcctcaaccttttaggctcaagtgatcctcctgcttcagccttctgagtagctgggattgcaggcacatgccaccacactattttttttattttttatttttttatagacagggtgttgctttgttgcccaggctggtctcaaactcctgggatcaagtaattctcctacctcacctcccaaaatgctgggattataggcatgagccgctgtgcccagcccacagggtcctttttttttttttttttttttttttttttttgagatggagttttgctctttcacccaggctgtagtgaagtggcatgatctcagctcactgcaacctctgaccccagggttcaagtgattctcctgcttcagcctcccaagtagctaggattataggcacccgccaccatacctggctaatttttgtatttttagtagagacaggttttcactatgttggccaggctggtctcaaactcctgacctcaggtgatccaccctcattggcctcccaagtgctaggattacaggtgtgagccactgcgcccggccccacacagggttcctgataacccaagtgagccactctgccagaactgagcaacctgggccaaatctcctgacctctctaagtctcatgtcttaatttggggtccttcataccctaagataaaaattcaagtgtaagtagtttattcaagaagtgaagggaaaactgacaggagaatagagaggtgacagacagaaggaaagagccatgagagggtgtgtgattaaggcagctgccggtgggccgctggagttcagtcccactggggatatctgggagacagtatagaacacacacctcgggattacccccgagggttaagggagatagggtatcaatgcacaaactcccatcagtcaatgtttgaaagctgctggtgaaggggttataaatgcttccagcctgctgggccaacagcaagaggaaacccttgggcaaagaaatgcaggtgctagctcttagtgttcactgagttggttgaggcaagaagatatgagtgaggacctgaaagtgtctgtgacgctgcagttccctcctctataaaataaggaagagaattcctacctcacagggttgctgctgtactgctgcactgcaaattccaggggttactgttcatatcttggaggccctgagttgctgtgaaaactaaaggaggtggtgtagagagagcactatatgtcaataagtcctcaatatgagtattcctttttctttttcttaacaatcgcatcacttactctgtgtcgaacactgtactcggtgttacccacacctgagatacagatactagccatcttttacagaagaggaaaagaggctcaaggagtttcagtaactttcgccaggtcacggagcacatcagagccatgtctatgtgaccgcagagcccttgctcttagcctctgctatgcactgagtggccagggctgattctaacacactgcccaactgtgcttagtttggaggtcaggtgccaaatgccttgatcagcatcgtcccttgtcagacatgacccagatcagcttggggagaagctgcagccaggaactgacatgtcttctactgcttctctgcttgcttaattggtgtctctccaagatagctcaggtgggtgggagaaagtcttatttcaaactgcctgaggctttggcctcttctgcccacatatgccccacaggcatgttgtagcaccagcttttgaggaattaattttggcatcttaagcaccacccttgggggagttaattttgaatctctgcctctaggtttgcaaagacaagtggtatggcagggccctttgttctgtcaaactggttcagctaagcccaaaagaaatgaacattgtgcccacttttgtctttctgccttgggaggtccaagctgtcactgctaaccttcctctccagggctcctagagtatccaaatctgggtacctgtgcagatgagattattcagccttcatgaagtgcttttattctgggaataaaagtatgatggacattgtggctgacccctcaacatcccttccattcaatcctacatgtggaaagactgtggcgtttggaattgctccagttccagaaataggtcctggtatttttggctagctattcaccacatccattttcctttcctctggagttgcagctagactacatttcccaacctccctttcagttaagtgtggccacgtgactaagttccagtggtgtgctgatgtataacaaccaggtcaccagggtgagtggaggctctgattgtagcatttggtgattcccatatatggctgattccaagataccaatgtgatgtcactgaaaatggagttaaggatgggtgtgtgctagcatactattacaaagcattcctccatacagatacaatggtattcattattctagaggattagtactacttgccaggcactgagtatgtgcttttcatgctgtcacagctgagacagagtttaatgtgcaggacacttacttaaaaaggcccttggatcaacacttgatggcagagagtgaccaaaatagaattgggcagaagaagaagtcaagctacaatgcaggtctaataacagcactggccaaacccatggacagctctgaagctagaatgggccttcaatcttgtcccaaattgggccatgatgaccaggcccttatgctcctatatcagtcagtcttcggatacgagccaccatgggaagattaaaaccttgggcaagaatactctctgcagctgacaccctccgattatctggagcaacgagtcttagaggaactctgggaaacacaaacattattttattcaacaaccctatgaagaagagactattgataatcccattttacaggcaagtaagtagaagttctgagtggttaaataattgccttaagccacaggtctgtgtgattggcaagctcatgttcacttttatcccttatatcctgtcctgctcacctccagccctcatctgcaaggcagactgggcagatggggcaggaaaggcagggaggactgcctgaagctcaaagcacagactgtccttggaatgttggaaagttatttggaaagtccttatgagcttggggcacattcttctgaagagctttcttgattaggaaaatcctgtgctttgaggatggaattgaatgtgtggagacagccaaaggtcactgggaaaagagccacagttgcagggaaaggaagcaagctcagggacatcattagagatcgagagccagccatggctatacagagacaggcccaaaagaacagtcacctccagcagggccatggcagtttccttggaggaagtcctaagccgcccagagaatgagtggcccaaagttgctcattagcctgtgccactttgaggaagtcactccacctctctgatactcagccttctcatctgaaaactagggacaatgacctgctctgcctgaagcagcacaatggagcatttaggattgctggctttcaaatcagacagggagtcctcggctctgccacttactgtgtaattttgagcaagttctccaatttctcggcgcctatttccacatccgtaaaataagaataagagtacctgtgaaacagggctattgggacaattacatgaattgacatagaaaaaggattttgaactgcaccaggtatactgcaagcactcaataaatgttagctattggttttattgccttagagtggagtatgaggattaaaggagctagtatgtgtggaaggtttgacatataatttggcctagaggcccagctcagaaaatggtggcattctggtatctaatgctgcatcacaagccattccaaagctcagtggcttaaaataacaacaatcattaactttgctcataaatctgcaatttgggcagggcttagcagggttggctcatctctgcttcatgcaacatcagctgggaaggtgtgagtggggctggaggatttgcttccaagctggctcactcacatggggagtaagtcagtgctagctaatggctaagagcttggccaaggctatacactggtggcctccattatctctgcatgggcctccctgcagtgctgcttgggcttcctcacaacatggcagccaggttctcagagcaagcgttccaagaaacagaatctggaagactccagtctcttaaatcctgggccagaaaaatgggtacaacttcacttctgcaatgttttattagtcaacattcactgagtctgctcagattcaaggggagaaacacagacccctcctcttgaatgaaaagagtgtcaaggaatttgcagacatctttaacctactacaggtagtttgcattctcactccaggtactggccccaggtaactatgctcagacacagataggtaagttcttccccaaaccatgttccaacctagaagtgggtgatcaaatggggagtggaaaactgactcctcacaactgaggtaaatcctacttgtcatttaatattcagtagaagagaatcagaatctcccatctcccaagatccctgagtcaagtgctccctctgcactcccatatcctggcttctctgttcctggagctggtcagggagtagacagtgtattcaggagctgcaagtcagaatggtaaagagcacagagcttgcttgggtgggcttcctaaactcactgtgccttaggtatctcatctggaaaatgagaatgataatctctacatcataaagtaattctgaagattaactgaggtcacaagtaggtagggtgaaaacaaattaacaagcaacaaatcaaatgcatttctggaaaatgtggcattattttttgctttagagacagatcttctcttgctctccagctcccttccccactaggttgtcgtgagtgggcagagaaaaaggaactttaaataagcaattaaaagtatgcctttctaagatgggaagctgcgtatatgtttagcattatctcaactatgtaaaaagataggaactagaaggaaatgtgccaaaatgttaacagtggttgactctcagaggatgatgggatgacaggtgattttatcctattgcttcttcaaacttttctggtatgtctctacatcttaccagtttttgtgttacttttataataaacacacacacacacacacacacacacacacacacatatatacaatgaataaatatgtgacagcacctcttccacctacacccacacactcccacacaagttcattcctctacagaacaggctttctacaagatggtgctattggagctttaggcctgacaattcttcctatcctgaagtaaatcacacattgcaggacatttagcctctcacctctgcccacttaaatgccagtagcactcttagtgtcaaccaagagcatccccacatgatgcagaaaaatgttcttatttttcagagatgcatttaggggttgaaatgttatgatagttgtaatttgctttaaactgcttcagaaaaaaaaatagataaaacgattacagccaaatcccccatataactgagaaatccacgtgatagatataagtgtatttgttccatgattctttctacttttctgtagtgggtggaaaatgtcccacctatttccaaatgccccctgctgctgtgatgtcacaccaggttgaaaacccatgcctcattgcatctcatcctctttttcataaatattgcatctgattatcaggttaaaatctctacaggggctgctttatttttcttctaaatgttttctcctctgcttccttctcctcaagatgacatctggatgtagggaaatgttctcatggcaatggggagggatggccctggtacagtcctgtgagtcctggctggtttcacaagatgccccttgctttacctagccaggggtgtcctgatggtgccagctgctaaagcccacacccgctgaaactcacagtctgttcttgccaccaccactctcctgggcacctgagccccagctgcatcctccatccagccctgcctcagctgctcatcccacagctccctgggctccctggttttcaaacccctcagcaatctaccccatcccagattcataggaacttctagatctctcccaggacatgcacatccatgacatggttcctaatacaggagacaaactggggtgggataagagcagaaatcagggaatctcaaccctccacccgtacattacatgtatatggcatcttgcacatgtcatgtccactgtctttaaaataacaaaccctggccgggtgcggtggctcatgcctgtaatcccagcactttgggaggccaaggcgggcagatcacaaggtcaggagatcgagaccatcctggctaacacggtgaaaccccgtcttcgctaaaaatacaaaaaattagccaggcgtagtggcgggcgcatgtagtcccagctacttgggaggctgaggcaggagaatggcgtgaacccaggaggcagagcttgcagtgagccaagatcgcgccactgcactccagcctgggtgacagagcaagactccatcccccccaaaaaaataacacacacactttctgggtgcctactctgtgccaggcactgtactaagggtctgggtgccccagctcacttcagatacacaccaggtacctgctaatatgggaaaaggcaaacaaatcatgatgcacctatgcaagttaatacctggaaactgttgaaaagggtacaattaattgacatgtgctgataagaaaaggtgttcaagacatgtagttagatgaaaaggtaagtttcaatacaataggtggggcatgatctttttttccatgaaaagatacgtataataatgagaactgtgagcaacacatttttctgcccctgccttaaacaataccgggaccaagtaataataatttagctgtttgctccaggaaatgcctgctcttggaagataagaccaaaccaactaaacatcttacttatcaaaatagataacttgctcatcaagaattaattcaaggctcttgcctctctgggctcaccaatccaaagcaattatgtcataaattctgcccaagcccagacaattacctgtctgtatcacttacctaaaaattaccctgagcagcctaaaccttgtaagtgtcttttccttaatttcttcattttgaaatactagaagaactttttaaggcattgttctcccttactacagttaacttaatatgtttagctttgtttgatcaacagtttttcctggtgggctttcagggaatcaatcatcaaaaagagtcacttaatatgtgctgagcactaggtggagtgttttatacactaatcctactctgtgagatttttaatgtcattattcccattttacagatgaagaaagtgaggatgagaatctgaacaacttaaggacataaacagacatttctcaaaagaagacatgcatgcagtcaacaaacatatgaaaaaaagctcaatatcactgatcattagagaagtccaaatcaaaaccacaatgagataccatctcatgccaatcagaatggctactaatggctgggcatggtggctcatgcctgcaatcccagcactttgggaagctgaggtgagcagataatgtgagtccaggagttgcagaccagcccaggcagcatggtgaaaccccatctctaccaaaatacaaaaaaaaaaaaaaaaattgccctgtgtggtagtacatgactgtagtcccagttacttgggaggctgcagtgggaggatcacttgagcctgagagacagaggttgcagcaagccaaggtcgtgcaactgcactgcagcaggggtgatggagtgagatcgcatctcagaaaaagaaaaaaagaaggaaaaaatagactggctattattaaaaagtcaaaaaacaatagatgctggcgaggttgtggagaaaaaggaacatttttaccctgttggtgggagtgtcaattagttcaaccattgtggaagacagtgtggcaattcctcaaagacctagagaaagaaatactatttgacccagcaatcccattactgggtgtgtacccaaacgaatacaaatcattgtattacaaagatacatacatgtgtatattcattgcagcactgtttacaatagcaaaatcgtggaatcaacttaaatgcccatcagtgatagactagacaaagaaaatgtggtacatatacacagtggaatactatgcagccataaaaaggaacgagatcataacctttgcagggacatggttggagttggaagccattattctcagcaaactaacacaggaacagaaaaccaaataccacattttctcacctataagtgggagctgatcaatgagaacacatggacacacatggtgggggagcaatacacactgggcacctgggggctggggaggtgggggatggaagagcatggggaagaatgacgaatagatgctggatttaatacttgcatgataggacaatctgtgcagtaaagcaccatggcacacatttacctatgtaacaaaactgaacatcctacacatgtacccctgaacttaaaataagaatttgaacaacttgccaaatattacacagggaataaatttcagagaccacattcaaacccatgcagtctggctgcagagtctgagagcttaacctcctcatattgcctctttgctggttattatgactatgtaacaaattactcaaaacctccgtgacttaagaaaacaactacacttattttgctcacacatcttcaatgtggatagggatttaggggaatagattgccctgttccaactagcatcagctgaggtggcttgaacactgaaagatggaatcatctagaagctcattctgacaattgatgctgtcagctgggatctcagctgggaaatcagccagaacacttgcatgtggcctcctcatgtgacagggcttcctcacaacatggtggctgagttcccaggtgagcatcccaagaaagagacttccaggtggaagccatagtgtctttatgacttagaagtcatgaagtatcatgtatgacacattttatctgccaaggcaatcacaaagccctccccagtttcaaggggagggaaaacatatttacctcgtgatggggagtggcaatgtttagaaaagcacgtaagaccagaaatattgctgtggtcattttttaaattgtgatcttccacagacccatatattcagtgtgtatatacataaatctgaaatattatataacaaagagttagctatggtcatttctggggctgtcttttattttctataatgtttattgttgtacaggtgtaacaagcactgtggcaacattacttttcaaagacttgatgtctattctcaaaggttcacactgaaggtaagtatcctgagcattaccttttccttctcctgtatccatatgtgcctctctctgccctgctctatgttccaggagactgaactttatgcagtctatcacccaagcaccatcaccctctgacctgtggttggtttcagcctatgggagcagtggaaggaaatcagagggggagaaaaaggagaggttgcgggcatttgttcttccctccccacctgtccatctgttgggcagtccctgttccacagctataggtatcagtaagctccagtaataattctttcatcttaatccttcaagcccaagactggtaatggctttggcttatggctaggccctgggtgcttcatcttccggtatgggttcccttaatcctgtctaatcctctcttcaaggaagcctgtaactgtgctttctgtttcctacaagtccctgactgatccaaggcattgatggagacaaatcagtaaacaatggcattacagtgtgttgattgctttgagagacatggacaggaaaagaaaatcagatttttctggaagagtcagggaagccttcctaacaaaagtgatacttaaattgagacacaagagatgagttgacattcaccagtttgtgaaaaaggttttcgatcctgtgggattttcatggataaggaaataggcccagagaggtaaagtgacttacccatggtcacacagtgaatcgtacagactgaagccttctgcttcatctatcacaatagaggacaagtttattgtatcagttgagatgtttatggctgtaaacaactagaaaaaaagtcttaattagtaaaatgcatcatataataatatgaagaccaaagtaaggtaactccaggattgatgaaattaaatcaaatgcttaataatgtcatcagattgaagtcaaaataaatgcagtgatataccatggattagaagactcaatattggtaattaattcccttgaaattgatttgtagatttaatgcaatcccaaccaaaatccgacaaagtatagaaattatcaagctaattctaaaatttatatggaaatatgatggacctagaaataacctaggcaatcttaaagaaggatatgccccaccagctatcaatgcttactataaagctatagtaattaaggcagtgtgatattggtgcaaggatggacaaatagaccaatggaatagcatttagactccaatgttggatccaaacaagtatgatagcttgatttaccaccaaaattcagtaggtcaggagaaattttatatcaacatagaaaataatctatatggaaaaaatgaatggaacattacacagtgctctaaactagcctgggaatagtggctcacgcctgtaatcccaggtctttatgaggccaaggcaggaggatcacctgagaccagaaattcaagatcaacttgggcaacatggagagaccctctctctataaaaaaatttttttttaattaccagggcatagtggcatgcgcctatagtcccagctatgtggggggctgaggcaggaggattgcttgagctcaggagtttgaagctgcagtgagttatgatcgtgccactgcactccagcctgggggacaaaaccagatcctatctcaaaaataaataaataaatataaactaccggtataataattacattaaataataaataaataaatataaactaccagtgtaataattacattaaagaacctcaaaaacatgttgagcaaaagaagccaactacaaaagagcttatgctatattattcaattcatataaagatcaagaacaagtaaaaccatggagataggaattaggacagtggatttaaaatgggcaaaggacttgaatagataattcccgaaagaaaatggccaaaaagcacatgacgagatgctcagcatcactaatattttgagaaatgccaatcaaaaccacaatgtgatatcatctcacaccaattaggatggccactatcaaaagaacagaaaacaagtattggcaagaatgcagagaaataagaacccttgtgcactgctgggaatataaaatggtgcaacagctatggaaaacagtatggaagttcctcaaaaaattaaaaatagaattaccatatggcccagcagtcccacttctggatttatttccaaaagaattcaaagcaggatctcagagatatttgcactctcatgttcactgcagcattattcatagtagtgaagatgtggacacaacccacatttccaatgacagatgaatggataaagaaaatatggtttgtacatataaaggaatattatgcagtctttaaaaagaaggatttgctggcgagagtgtaaattagttcaaccatcgtggaagacagtgtgtcgattcctggaggatctagaaccagaaataccatttgacccagaaatcccattactgggtatatacccaaaggattataaatcattctactataaagacacatgcacatgtatgtttattgaagcactatttaccatagcaaagacttggaaccaacccaaatgcccatcaatgatagactggataacgaaaatgtggcacatatacaccatggaatactatgcaaccataaaaaagaatgagttcatgtcctttgcagagacatggatgaatctggaaaccatcattctcagcaaactaacacaggaactgaaaatcaaacaccacatgttctcactcataagtgagagctgaacaatgacaacacatggacacagggaggggaacatcacacaccggggcctgtcggcaggtggggcgaaaggggagggagagcattaggacaaatacctaatgcatgtggggcttaaaacctagatgatgggttgacaggtgcagcaaaccaccatggtacatgcatatctatgtaacaaacctgcacgttctgcacatgtatcccaaaacttaaagtaaaatttaaaaaatataaaaaggatatcctgtcacatgctataacatggatgaacctcaaggatattatgctcagtgaaataaactagtcacaaaatggcaaataccatatgtttccactcatatgcggtatctaaattagtcaaaactgtagaaacagaaaatagagaaggtgattgccaggggccaggaggaggtgggaaaggaattagtgtttagtgggcatagagttcgggttttacaaaatgaaaaaaaatcctggagatctgttacacaacaaggtgaatataattaacactactaaactgtacacataaaaatgtttgagtgtaaatttaatgttatgtgttcataaccacaattaaaaacaaaaaaaaattgttaaggcattggaacactgaggataggaaattgcctgggaaggggcacgaggcagccctctggagagctggaagtgtgctgtatcttgatcgggctcatggttacaagagtgtatacacataaaatcttccccaagctgtacacttaagatgtgtgcactttattgtatgaaagttatacatcaggtttaaaaatgtgccaccaaagaggacccaattcttttcatattttcactgtgacagcctcagtgtgtggactttgtcttaatcataagatggcagctgcaagagccaggcattacatgtaataaggaatatgtctggggtaaaaagagaccctcttttcctgtgtgtttttgaaaagtaaagaaacatttcccagagccaccacccctaccagcagatgctttctcacgtattaatgaccacaactgcatcacacgtcctggcctacgccagttgctggcaagggaaataagagtgtcatgatcagggtttacctttgcccaggtcatatggattgctgggtcagtgatcaatactatgtttttgtttttgtttgtttgtttgtttttgttttgttttgttttgttttttgagacagtctcgttctgttgcccaggctggagagcagtggcttgatctcagctcactgcaacctccgcctcccaagttcaagtgattctcctgcctcaggctcccgagtagctgggactacaggcacgcaccaccacgccccgctaatatttgtatttttagtagatacaggctttccccatgttggccaggttggtctcaaactcctgaccttgggtgatccactggccttggcctcccaaagtgctgggattacaggcataagccaccatgcctggccaactctacaggcataataataagtccctcaacaagggactggactgccccacagaagacaacctacaaaggcaaagcagcatctcttcttctacaccttctttttttttctttgtttttttaaaaatattttttccaaaatggtgtatcatcattgtttttctaattatgtgattaatgttcattgtgaaagttcaactagtaagtgaaaataatccaaaattaaccctccccaccccaccataataatcagtattaaaagtctggtctgtagacttccagattttttcttgtcatatatgtcattttatgtacttagacaattttttaaactacagaaataggagcacaacatatgcgttaaatactatcattagtctacatgcataactaacacttcttgatcatttcctctgccaacaatccaaatatgcttcaagggggaaatcagccccttccctggtcccaggaggtgaagtataattagcataaaagagtaggtttttttttttttttttagacagaatctcgctctgtcccaggctagagtacagtggcacaatctcagctcactgcaacctccgcctcccgggttcaagtgattctcctgcctcagcctcccgagtagctggaactacaggcgcctgccacctagcccagctaattttttgtattttcagtagagacagggtttcaccatgttggccgggatggtctccatctcttgacctcatgacccacccgcctcggcctcccaaagtgttgggattacaggcgtaagccatcgcgcccagccaaaagagtagttttgaactctgctacccattgaaaatacccagggaattaaaaatatatacatagcccaggtcccactcccagagatactgcactacagactgttggtgtgctgtggactcaggagcctaaaccttgcaggtggtattgctaacatgtggctggagttgagagctactggtctcaactcattgttacagtcctgttcttaccactgacttatttaagaattgttatattcctgttctccttaccacctgatggaggttctggaaaagttttccccaatctcagaaagggacgtggttaagatattaatatcttctgcctctatatattgccattagcatggcgcttctggagcaatggcaattatcctgggccttggagggaataagactaagacagcggtccccaacccctgggccactgaccagaacctatccgcagcctgttaggaaccgggctgcacagcaggaggtgagcggggtgagcaagccttactgcctaagctccgcctcctgtcagaatcagcagcagcattagattctcataggagcaaaaccctattgtgaactgcgcgtgcaagggatctaggttgcacgctccttatgagaatctaatgcttgacgatctgaggtggaacagtttcatcctgaaaccaccagcagcaccctccccaacctttccccctctccctgccatccgtggaaaaattgttttccaccaaactgttccttggtgccaaaaaaggctggactaagaggatgagccaatgatctggggatggcagaacaagaatgtagaaagaactcaaatccttgatgatgtatctaaggttgaattagccaaccctggaaacactctacttctagcttcttgagtgagatagcatttcatttgcattttcacgtttgagttacatacagccaaaagcttcctaactagtacaagctggagtacggtggcataattatgactcactgcagcctctaactcctaggtgcaagcaatcctcctgcctcagcatcacaagtagctggaacaggcaagtggcaccacacccaactgattttttatttttatttttgttgagacagggtcttgctatgttgctggtcttaaacccctgacctcaagcgatcctctcacctcagcctcctgagttgctgggattacagacataagccactgaccctggcagtgtttttaaacttctttctatttaactccttcaggtattgtttgttattagttcatgatatatttttataattttgttttagaaattaaaaaaagggaaaataataaccacagtgtcaggatcatgtttagaagcacatggaagaagctatgaccaaaaaatgatataaatcggctgggtgcagtggctcacacctgtaatctcagccctttgggaggccaaggtaggtggatcacctgaggtcaggagttcaagaccagtctggccaacatggtgaaatgatgtctctactaaaaatacaaaaattagccagatgtggcggtgcatgcctgtagtgccagctacttgggagactaaggcagtagaatagcttgaacccaggaggtggaggttgcagtgagccaagattgcgccactgaacttcagcctgggcaacagagtaagacttcttctcaaaaaaaaaaaaagatataaattactaaaatgcgtatatgtcttatgtaacaagaagtgctgggtatgccttatgcctcctctttccttctttcctctgcacactgtgaagactcatctttaggctttgtagtctcatggctgtatgctgtttgctgcactctagacaacacttccatgttccagacagggagaatggggaaggggcaaaaaggcaaaagagaagcaaggaacaggggctgttccttccataaaagcatccctgaacgtctcatccagtgacttccactgcactttatcagccaggactccttggtactggaaggtttgggtcactcagttgcatttttatccttctatatgtaattctaagcttcattaaacttatttgcgatataatgagtaactttttccccaagataattttaaaatattctattgtgttttagggatatgaatataaatgtttttcctgtgcaagcatttgccaaaaaagacattgttcttgagagatgtgtattctctcaagtttgggtattataaactaagaatgattccactgggaaaatgttaaccagagaaatattctgcaggatatccctgaatactgtggaggtttttccttacctccagctccaccttatctttggtgagttgcatagtaaacattccactgtgtggataactaatgtaccttgtcccctactgttgaacatttagaatgtttccaatatttcacaattataaacaaggctgcattgaacatctttatacaaacacccttgaccatttgtccaattacttctttgggatccttgaaatgaaatgctaaactgaaagttctgcaaattttacattttgatacatattgccaaattgccttctgaaaggttgtaccaactccattacttctccattgctgcaataatgaacatgcatcacaatggcaccctggacctcttacatggagaggaggatagatggttctgttaacgtagcctttggaagcagagagcttcataattcagacaccagttacatttggaaatgagattagtacaaggaatcttcccattcatctcgctaaaagtttcaaggttccattcctgggcagatgaaacaataaaacaaaaccagtgaaatgaagtcaatgtggagccaagacatttactttgataaacgtttccatttaggaccaattttcagggcagcttgcttagctctgacttgaaggagcatcactaccatgctccaccacagtttctctctattagtgatttttctccctaaaacacacacattgacctcattagctcccttctcaaaagtatgtcatgatgccccaccctacatatgttcttgagaatgatgcccaatatcccagtagaagagctgccattgcttactacatagtagtgacagcatcagcaatcatataaaagcttgcagttacttaatggggaattagtgtttaacgggtacagagtttcaggttgggatgatagaaaagttctggagatgaatggcggtgatggtcgtacaacaatgcgaatgtatttattgccactgaattcaactcttaaggatgattaaagtggcaaattttaacttatctattttaccacaatgaaaaaaattttctttaatcacagacttccagtttccagttcaacatgtgagatgttggaagttgtcattttatcctaacaagccaaaaactgaacaaactgaaaaatcaacaactcttcttagatttgtcagagaactgagatcataggacaaactgccgccctctaaattggagaaagagaggcagatacatagaatcacaatttaccagagcaaaaatcctccagtagaaacttgtgcaggaatcagtactagataggaaaacctgacctgcagttgacaaaccgatggaggctcaatgtggacaagtctgagagacaaaaacgtcagaagggtccagtcatagggaggcccccacacttcttacctttttaccttcaggagctctatggggttctcacggtgagtattaaagaaaaacaaaggcttcttgcaggtggaatggggaaaggaaccattgtgaaatacaccagagcattctgttcataagcaagtctgccctcaggagaaactattttgccagagcttgacctattggagttttaacagaaccaaaccaacctaggggaagggaaatagccaactcccccaactctagccatcttgtcccacttaagggggcagaggggactaagaagcacatgtgaagctcacagctcatagacacagactcactaaaagactgagacctaatcataggactatagaatgtttcccctcaccctacacctttctgccacactgctaaagacctatttatttaagttctttttatgcagtacatcatgcttggctttcaccataaaattacaaagcatactaaaaggcaaaaaacaatttgcagagagaccaagcatcagaaccagatttagatatagcagggagggatgttggaaatttaagacaactgtgattaatatgccaagggctctaatgagaaaagtagacaacatgcaagagaacacacagggcatgtgagcagagagatggaagatctaagacaaagttaaaaagaaatactaaagattaaaagcactgtaacagaaataaagaatgtctctggtgggctcagtagtagattggatgtggctaaagaaaaaatgtctgactttgaagatatgtcagtagaaacttctaaaactgaaaatcaaaaaaaaaaagactgaaaacaaaacaaaacaaagacaagaatatgcaagaactgagggacaattacaaaaggtataacatatgcataaagggaataccagaagagaaataaagacagacaggaacagaagaaatatttgatgcaataatcattgataattcccccacaaataatggcagacaccaaatcacagaccaggaagctcagagaacatcaagcaaaataagtgccaaaaatctaacaacaacccccaaaaaaagacatttgagccatatcatatttgaactgcagaaaatcaaagataaagaaaacattttgaaagaagccagaggaagaaaacagcttacctatagagaagcaaggataagaattatatctgtctcctcttcagaagccatgcaggcaagaagacagtagagtcacatatttaaagtgttgagagaagaaaaaagaaaaaagcaacctagaattctgtgctctgtggaagtatccatcaaaatgaaaaataaagaaagactttttcagacaagcaaagatggaaggaatcagttgccagtagacttgccttgcaggaaatgttaagcaaatttcttcagagcgaagaaaaattatataggtcagaaattcagatctacgtaaaaaaaagaacatcgaacgaggaataagtgaaggtaaaatagagcttttattactcttattcttaattgatctaacagatgacagttggttaaaaaataatagcaaagatgtattcaattatgtacgcttatgtgtgtgtatgtatacacacacacttatgtgtaaataaaatgagtgacagcaatgatgtaagacatgggaaggaggaattaggaatactttgttattataaggtacttgcactacctgtgaagtagtatagtgttatatgaaagtggacttgtattcattgcatatgtattttatatatagacacaattctagggcaaccactagaatgcatatgcattatatatagctgtatatgcattatatatatgtatagagagggtgagagagtaagtgagttccagggcaaccactaacaaaagtataaaaaaagaaggatgatataccaagaaaggagagtatgttaggttgttcattgcattgctgtcaagaaatgcctgaggctgtgtaatttataaagaaaagagggttattggctctcagttctacaggctatacaatcatggcaccaacacctgcttgacgtctggtgaggccctcaagaagcttttactcatggcagaaggcaaagtgggagcaggcacatcagatggccaaaaacgggagcaagtggagggcgatgccccttttaaacaaccagatctcatgagaaatcattcactatggcgagaacagcaccaaggcgaatggtgctaaaccattcatgagaaatccacccccataatccaatcacctcccgctaggccccaccttcaacattggggattacatttcaaaatgagatttgatggtagcaaatattcaaatgatattggagacacaatagaataatataaagtgctcaattaaaactacaaaagacacaaaaagagtggaagacaaaaataggaacaaagaacgagggcaatgaatagaaaactgtaacaaatattgtagatatgaatctaactatatcagtaatcatgtaaatgtcagtgatctaaatacatcaattaaaagacagattatcagaatggattaaaaaataagaccgtcgggtgtggtggctccatgcctgtaatcccagcactttgggaggctgaggtgggcggatcatgaggtcaggagttccagaccagcctggccaacatagtgaaaccctgtctctactgaaaatacaaaaattagccaggcatcgtggcgggtgcctgtaatccagctactcgggaggctgaggcagaagaaccacttgaacccgggaggcagaggttgcagtgagccgagattatgccactgcactctagcctgggtgacagagcgagactccatctcaaaacaaagaaaagaaaaaaagacccaaccatttgggtcataaattgtctacaaaagatcccctttaaatataaagacacatatagattaaaagtgaaggggtagagaacaatatgccatgacaacaccaatcaaaagaaagctgaagcatctatactaatttcaaatagaggccgggcgcagtggctcacgcctgtaatcccagcactttgggaggctgaggcgggtggattacaaggtcaagagatcaagaccatcctggccaacatggtgaaaccctgtctctactaagaatataaaaattagctaggcatggtagcacgtgcctgtagtcccatctactctggaggctgaggcaagagaatcatttgaaactggcaggcagaggttgcagtgaactgagattgtgccactgcactctagcctggacgacagagtaagactccgtctcataacaaacaaacaaaagcagagcagacttcagagcaagaaaaattatcaggaaaaagaagagcattacataaccataaaatggtcaattctccaagaatagacataacaattatgtctccaagaagatataacaatctttaatgtctatgcacttaacaacacagcatcaaaatacatgaggcaaaaactgacagaaatgcaaggagaggccaggcacagtggctcatgcctgcaatcccagcactttgggaggccaagacaggtggatcacttgagtccaggagtttaagaccagcctgggaagtgtaacaaaatcccatctctacaaaaaataaaaaattagcccagcatggtggctcacacttgtggtcccagctactcaggaggctgacgagggaggatcacttgagccccagagtttgaggctgcagtgagttgtgtttgtgccactgcactcaccgtaggtgacagagagagaccctgtctcaaaaaaaaaaaaaaaaaaaaaaaaaaaaaaaagcaaggagaaatggatgaatctactactataggtagagacttcaatactcctctatcagcagtggacaaatacagcaggcaaaaagtcagtaaggatatagttgaactcaatagcaccatttatcaacaagaaataattaacaaatacagactacttcatccaacaacaatagaatacccattcttctcaatttctgatgaatatcactatgatagactacattctggtccataaaacacacctaaacacatttaaaagaatagaagttggccaggcatggtggctcacgcctgtaatcccagcactttgtgaggccgaggcaggcaaatcacttgaggtcaggagttcgagaccagcctgaccaacatggagaaaccccatctctactaaaaatacaaaattagctgggcatggtggcacatacctgtaattctagctactcgggaggctgaggcaggagaatctcttgaacttgggaggcagaggttgcggtgagctgagatcacgccactgcatgccagcctgggcaacaagagcaaaactccgtataaaaaaaaaaaaagaatagaaggaatagaaatcatacaatgtctactcttaggcagcaatgaaattaaacaagaaatcaataacagaaagacagctagaaattttcaaactatttggagagtaaacaacactttctgataacaggtcaaagaagaaatcttgagagaaatttaatactattttgacctaagtaaaaatgaaaatacaatttatcaaaatttgtagaaatgcagcaaaagcagtacttagagggaaattaatagcattgaatatatgtgttagagaaaagaggctgggcacggcggtacatgcctgtaatcccaacactttgggaggccaaggcaggtggatcacttgagggtcaggagttcaagaccagcctggccaacatggcaaaacctcgtctctactaaaaatacaaaaattagccaggtgtgatggcacacacctgtagtttcagctactcagaaggctgaggcagtagaatcgcttcaacccaggaggcagagattgcagtgagccgagattgcgccactacactccagcctcggtgacagagcaagacactgtctctaaaaaaagaaagaaaaaaagaaataactaaaatcaataatctaagctcccatcttaggaaataaaaaaaaaaagcaaattaaacctaagtaagcagaagtaaagaaataattaaaaacaaaacacaaaacaatgaaattaaaaatgggaagtcaatagggaaaataaacaaaacaaaatattggttctttgaaaagatcagttttggccaaggtcaaataagccttggccgggtgtggtggctcacgcctgtaatcccaacactttgggaggccgaggtgggcggatcatgatgttaggagttcaagaccagcctggccaacatggtgaaaccccttctctactaaaaatacaaaaaaaatagccaggcatggtggcgggcacctgtaatcccagctactcgggaggctgaggccggaaaattgcttgaacctgggagccggggatttcagtgaaccgagatcatgcccctgtactccagtctgggtgacagagcaagactcagtctcaaaaaataaaataaaaataaataagcccctagccagactatctaagaaaaaacaagaaaaggcagagattaataatatcagaaatgaaagaggtgccattattccagatcccatgaacattgaaaggataataaaggaatattattaacaactccatgcccacaaatttgataacttagaagaagcagaccaattccttgaaagacacagtttgccaaaactcacacaagaaaaaatagacaatttgaataggcctatatctattaaagaaattgaatcaacaattaataaccttccaaaacaaaaagcaccaggcccagatgcactctgctgaattctacgaaacatttaagaagaaattatactggtgaagcgcagtggctcacaattgtaatcccactactttgggaggccaaggcaggaggatcccttgagtcctggagttcaagacaagcctggaaaacatagcgacatccctgtctctacaagatatataaaaaaaaaaaaatcagcaaggtgtggtggcacacatttgtagtctcagctactcaggaggctgaggcaggaggatcacttgagactaggaagtcaaggctgcattgaaccatgatggagccactgcactctagcttgggtgatagagtgagaccctgtctcaacaaagaagaataagaaggagaaggagaggaagaggaagaagaagaaggagaaggaggaggaggagcaggaggaggaggaggagaaaagaaggggaaggaagaagaagaaaaagaagaagaagaagaggaagaagaagaagaagagaagaagagaagaaaagaggaaaaagaggaaaaagaagaagaagaagaaaggagaggaggaggaggaatacgaagaagaaagagaagaaaaaattatagcaattctcaacaatctctcagaaaatagaagcagagagactatttcctaactccttctatgaggccagcattaccctaatacaaaaaccaaagacagtattaaaaaaaaagtcctcaacaaaatattagcaaatcaaatcccacaatgtagataaaggattatacacaccatgacgaagtaaaatttatcccagatacgcaaagatggttcaacattcaaacatcaactaatttttcaatagcagacagatactaaaagcaaattaaaaataaataaataaatataatccacatcaactggctaaagaagaaaaatcacataatcatattaacagttgcagaaaaagctagtgacaaaattcaacatccattcaacataaaaactctcagcaaactagctgggtacagtggcacacacctgtagttccagctacttgggaggttgagccaggaggatcacttgagcccaggagttttagtccagcctgggcaacataaccagaccctgtcaaaaaaagaaaagaaaagaaaaaggaaggaaggaaggaaggagaaaaattaacaaaaaatatcaactttcagcaaactaggaatagaggggaacttcctcgacttgataaagtacagataaaaaaaccttacagctaaaaacatattttgacaaaaacaaactcactagaactaattggtgattatagtgagtgtgcaggatacaaaatttatgtttaaaagttaatcaatttcctatatgccagcattgaaaaagtggaatttgaaacagaatactatttacatgaccactccaaaaatgaaatacgtaggtataaatctaacaaagtatgtccaaaatatatatgaggaaaactatgaaactatggtaaaagaaatctaaaaagaactaaatcaattgagagatatttcatattcatggataggaagattcaatattgtcaagacgttggctcttcccaacttagttcaatggattcaatacaatataaatcaaaatcaaaagcaagttattttgtggatatcaacaaatcgtttatatttagaggcaaaagatccagaatagccaagacaatattaaaagaggagaacactattaaagaagaaaaacaatattaaaggagaagaaaaagtgtcaggactgacactatccgatttcaagatttaatgtaatgaatgctacatacttcggaggctgaggtgagaggattgcttgagcccagcagttcaaggatgcagtgagctatgatcatgccacagcactaaatagatgtaatcaataagaaaagaattgctttgacagataacactttgattgctcgatatcttggcaaatacggcatcatctgcatggaggatctgattatgagatctatactgttgggaaacgctttaaagaagcaaataacttcctgtggcccttcaaattattctctccacgaggtggaatgaagtaacagaccacccatttcacagaaggtggagatgctggcaacagggaggaccagatcaacaggcttattagaagaatgaactaaggtgtctatcatgattgtttttctaatctggtcagttaataaacagtacctgctctcaaacggaaaaaaaaaaatacacacacacacacacacacacacacacacacacaaagctacagtaattacagtaatcaagactgtaatatgggtgaatgaatagacaaatcaatggaccagaataaacatcctagaaatagacccacataaaaatagttgatctttgacagaggaagaaaggtagtacaatagagaaaagatagtctttcaaaaaataataatggaacaactggtcattcacatgcaaagaaaatgaatctagacacagatctcacactcttcacaaaaattaactcaaaatggaccataaacctaaatgtaaaacacaaaattataagactcttagaagataacataaaataaaatctaaatgaccttgtgtatggtgataactttttagatactatttacattattacaccaaaagcatgaaacatgaaagaaagaactgataagctagacttcattaaaattaaaagctgttcttgagaagacaatgtcaagagaatgaaaagacaagccacagaccaacagaaaatatttgtaaaagacacatctgatataggactgttacctaaaatatacaaagaactgttaaaaactcaacagaaacaaaaaaaccctgattttaaaatgggcaaaggacctgtacacacacctttgtgtgttgtgttgtgaagatatatggataacaaataaacatctaagcagatgcttcacatcatatgtcaccagggaactgcaaattaaaacagcaatgagatatcactacatacccatcagaatggtaaaaatccaaaacactgatgacatcaaatgctagtgaggatgtggagtagcaggatctctcattcattgctggtgggaatgcaaaatggtacagccgcattgaaagacagtttggcagtttcctataaaactaaacatactcttattgcgtgatgtagcaatcacactccttggtatttacccaaaggagctgaaaacttatgtccatgcaaaaatatgcacatggatgtttatagcagctttattcataattgccaaaacttgaaagcaatcaagatgtctttcagtaggagaatagataaaaactgtggtacatccagacaatagcatattatttaatactaaggaaaaatgagctatcaaaacatgaaaatagatggaggaaacttagatgtatgttcttaagtgaatggagactatcggaaaaggccacatactgtgtgattccaactatatgacattctggaaaagacaaaactacggaaacagtaaaaagaatcggtggttgccaggggttggggggaaaggatgaataaggaagagcacagaggattttcagggtagtgaaactactttgtgtgataatgtaatggtggatacatgtcattctagatctgtccaagcccaagatatgtacaacaccaagagagaaccctaaggtaaactatggactctgagtgataaagatgtgtcagtgaaggtttgttgattataacaaacataacgctctggtttgggatataggaaactgctgccacatacacacaactgtgtgtatgtgggagcaggggaaatatgggatatctctctaccttccactcagttttgctatgaacctaaaagtgatgcaaaaaagaaagtgtattttaaaattaaatttcaaaaagctagcatttaatgtgtgccaggcactatgtacatatatatatatatatatatatatatatatatatatatatatatatatatatatatatattttttttttttttttttttttttctttttgagacagagcctcactttgttgcccaggctggactgcaatggcgcaatctcggctgtctgcaacttctgcttcctgggttcaagcgattctcctgcctcagcctctggagtagctgggattacaggcacctgccaccacgcacggctaatttttttttttttttttttttgacggagtctgtctctgtcgcccaggcctctctctgtcgcccaggctggagtgcagtggcgcgatctcggctcactgcaagctccacctcctgggttcacgccattctgctgccttagcctcctgaatagctgggactaaaggcggccgccaccacgcccggctaattttttgtatttttagtagagacagggtttcaccgtattagccaggatggtctcgatctcctgacctcaggtgatccgcccacctcccaaagtgctggaattacatgtgtgagccaccgcgcccggcctgtgtacacataatttaattttcacaacaatgctataagatggttctattactgggttggagtatacttcttcaaatgaaattctgtgtcaaaactgacctgtgaaagacctcaggtgtcttagaattgaccgtggttaggctgggcgcggtgactcatgcctgtaataccagcactttgggagggtgaggcaggcggatcacgaggtcaggagttagaaaccagcctggccaatgtggtgaaaccctgtctctagaaaaaatacaaaaattagccgggtgtggtggcacatgcctgtactcccagctactcaggaggctgaggcagaagaatcgcttgaacccaggaggtggaggttgcagtgagccgagatcgtgccactgcaccccagcctaggcgacagagcaagattccatctcaacgacaaaaaaaagaaaaaaaagaattaaccatggtttatccctctggaggacagaagtatgaggcagaagtcattgaaagaattttcatgcctctcaacaaaagcagatttggactttcgagagttgactctggctgcaatataggagatgaacagaagaagaggagaatggcatttgagaagcaatccagatgagagatggggtggcctgaacctgggcaatgcctgggaggagtggaggatttaggaagaagaatccccctggtccaggactaagtgcattgccagggcaggaggaagggtgtccaggcaacttactcacctgtctcagttcactccttatcagtgaaggttcctaaccacaagccacagataccaactctgatcagcgtaagcagaaaagaaataaactaggaagaaatggggtggtacagaaaattgccagaactgactaaccaggttaggggcagaaacaggtgcttcaggtgccccatgttacaattgcttggccccagctgtggtgaatagatctattcacattgatcatgttctacttcaggggcctactccatctctgcttttctgccttgggactttcttgaaatcccaggagtctgctcagcccacgcataggttcagttcagaagtgcaagaatatggccactcctggaggcaatccaatggggaaggactctggcacataaatgcctactattctttttgcttctcagaggtccctggagttgagccccatttcctttaggagccaccttgagaatgcaccctttctaggcttttcctccttcccgctgtcattctccttacttcctcgtacctacttcctgggatcacctcccaaataaaccatctccacctgaggttcttgtttcaagctctgcttttggaaaaacctgaagacagagactctgcaacagggaaccatgctgaaaatcaaagtacaggacaaagtggtccaggaagcacacctctgatctaggggagcactgaacatggtgaagtgcatcactgacccctcccacctgggagcctggatgctgcctcagcaccacgaccacccctgctgcaggaacacgaatttcctgtgactgctgcccttgtcatgcaagccttcctcaccatcctcatttcttgtgtcacttgttttctctccagagtgtgggtaagtgtacctgactggctaagcccagctcacatgaccatcctgtagctgcaagggaggctgggaaattgaatacgtctccttggaggttttgaaatcccaagtgatgtctgcctcccattaagactcataatatgaggaattctccaaatatagcaaacagaggcaggatggcccccaaataaataatatccatcccacatatcgcacaggttagggctggacccacttggatacttcattcccctgtcctgagaagcggtagcatctggtgctgaaccagacagttgaggtgttgccttgaccttgactttcctttaccaagttcagattcacttttacagtattcaaaagagcttcagtaaaacccagccctactagggagcctaagggcagaggcacaaagagttgtgataattgccctgccttcccctttttcttttttcagacaacgcactctgccttctgctggactttgaagtgtaattcaaaggactgagctgatttactcctatccagaccagctctcagcccaattaacaaatgcttcatcctgagactgggaacacaggtgctgctgggagaagttgggcttttccacccagacgcaggaggcacatccctctaaaggaaatggggaaagtcaacagatggggaaacaccaagtggtcacctaaactgagaagagaagttgggggccaggaaagacttcctggaaaagctgatatttaagataagtctggaaggaagagtaggaattaactccacctaataggaaaaagatgatctagtcaaattacctgcatgtgcagaggcctggagttgtgtgaaggtaagatatattcaaggaataaagccagggagagagcttagagactcagacaataagtggatcatcagttcttaggggatctgagacccccttgaagaatctgattaattctaccccaaaattgagcccatatacctgcatatacagaaactggcacactgccaagggatgcagggatccaagattaagaatccattatgtccccaacccttcatctgcagatgcacaacagccccagagagggctaaagtggaagtcacagcaaagcattgtttctgcaacaagatttggtttggtctctctttcaggctggaaacttacctcaagggactgatgatctttatctcaaagggaggcgagtaaaagctgatggaaagcttagtaagcacggagagggtttcacaactgatgtatttccttataggcaattgagtgtccagccagatttttcactgaaaagttccaaaggtcacgattgcaggtccattctctggggcagttcaatttcttcatagaaagaagctccagtccattgcctgttaggggatgggggacattgcccaatgagcctagatgtaatgttctaatgctgggctaggaacaggttggaggtgtcatcattcgggaggcagctttttagttaacccctatgttgttcagccccctcccacctctcccctatatcgcagccagagtcaatgctctctttgtggctgctaaatctggaacctgattcaaatttcccagagatcaaatccccggtggcctctggggacagacgtgcatggctgcataaggtcaaaatgcccccacaaagactttcagtcaatcctcgtgttttcagcatcctgctttccctccacctcctcaatgtctggttctgccaattcctgaggctttctggcattctggggtgaattggatgttcctcaatagatgccccttcgaaggcggcagggttaaccttcttccactctgccaaattgtttaccattccccaacacagtttctgtcttcctttacagtgttgcagggctagagatgttctacgggcttcatcaaagatggaaagggtgtttctgttgcatgttctcctaattgtctgaagtggatttaatgagaagagaagtggatagaaacaaaacttggccctccttgaatatacttaacactgttgatctttacactttgtaaagttgttcagatggtaaatttaagctatgtgtgtgtgtttttttaatcatgattaaatacaagacaaataagcaaaactcagccatcttactagaagtgtccccactgagttttccacaaattttgaaaaacaaacacaacaagacatttcctttaaaatttatttacatgtacaacatgaacatcttaattcctcctaaacaatttattgaggctattacaaggactgtctagagtggtgccacttaaagtatggtttctggaccagcagcagccacagcactttgaaacttgttagaaaagcaaattcttgggccctaccccaaacctactaaaccagaaactctgagagcaaggtgcagcgatctgtgttttaagaagctctccatgacaaaagatgaccagctttgtgatggttgatgcccagttaacgtttgacaaccactcatctagaacaatatgtgggaaaaacaaatgaaggaggttgaaggtcaaaggaagggcccaacttcataacctggagaaaagctaaaggaaatcatgaaaggagaagaaaaggtaactgccattcattgagtgcctacaatgtgcaaggtaccatgcttcccagtttacatatgtatctcatttaatcttcacagttttcttcaaaagaaagacatatttcccccattttacagataagaaaactaaggtttaaaaaaggtaagcaagttagccatgtaaaaaggatttcaaccacgggtctgtctgactccttaggctcttctgtttattttccatatgtcacttttttatttttatttgagacagagtctcgctctgtcaccaggctggagtgctgtggcacaatctcagctcactgcaacctccgcctcccaggttcaagtgatattcctgcctcagcctcctgagtatctgggactacaggagtgtgccaccacgcccagctaatttttgtatttttagtagagacagggtttcaccatgttgaccaggatggtctcaatctcctgacctcatgattcacctgcctcggcctcccaaagtgctgggattacaggcatgagccaccatgcccggccccatcactttttaaaaattaacatcttcactgagaatatcactgactatggaagaacagaaaaaaagaatgtcttcattgcttggcaaaatcctgttcttcctcctaagcagaacccaaatgccacctcctctaagtcttccaggactgccctgctcaaagttaactgtctcatagtaccttgcacataccagtcctgcagtacttcacagaccttattgtacaagttctcaaaccttgggtcccagggcctcttaaaaataattaacattcacaggcaaatataaactttgacttaaacctcacacaagaaaattaattcaaaatggatcaaaggttaaatataaaacacaacactataaaactttaaatttttcatttttatttttaagagacaggttctcactctgtctcccaaactggagtgcagtggtgtgattatagttcactgcagcctcaacctcctggctcaagagatctacccacctcagcctcccaagtagctaggactacactcatgagctaccatgccccactaattttttttttattattttttgtagagatgaggttttgctatgttgcccaggctggcctcaaactcttggcctcaagtgatcctcccatgtcagcctcccaaactgttgggattataggcatgagccaccatacttggcctataaaacttttaggaaaaagaattaaaaaaaaaacataggatatctttggaatgtagagctgggtgaaaaattcttaaacttgataccaaaacatgatgcataaaataaaaatggataagatggatccttcaaaatgaaaaccttttgctcaaagaccctgtgaagaagacaaaaatactgaaagtatttgcaaaccgcatatctgaaaaggcactgctatctaggtatataagaaactctcaaaattcaagaatgaaaacaaacaatctaattagaaaacgggcaaaagacatgaacagacattgcactgaaaaggatcaacagctagtaaataagcacgtgaaaatatgttcaacatcattaaccattaaggaaatgtaaattaaaaccataatgagatatcactacataactatcagaatggctaaaataataatagcggccaggcgcaatgactcacgcctgtaatctcagcactttgggaggccaaggcaggcggatcacctaaggtcaggagttcgaaaccagcctggccaacatggtaaaaccctgtctctactaaaaatacaaaaattagccgggcacggtggtgggcacctgtaatcctagctactcaggaggctgaggcaggagaattgcttgaacctgggaggtggaggttgcagtgagccgagattgtgccactgcactcaagcctgggcaaccgagcaagactctgtctcaaaaacaaaaacaccaaatgctggtgagaatggtgagaatggatcactcataaattgctggtaggaatgtaaaatggtacagccatgcaggaaaaagacatggcagtttcttccaaaattaaacatgtgcttaccacacatgcaattgtatttgggcatttatcccagagaaatgaaaactcatatccacatatgaatgttcataccaactttattcataataccgagaaatcaaaaatatcaaatattcttccacaggtgaatgattaaacagatggtgttacatggctaccatggaatgctatgcagccacggaaaggaatgaactattgatacatgcaacaacatggatggtctgaagggaactatgctgagtgaaaaaaaagacaatctcaaaaaaagttacatattgtgttattctacttacatggcattcttggaatgacaaaatgagagagagagagcacacagggattaaggatgagggaaggaagaaggtggctgtggctacaaaagggtagcatgagggatcctcgtgatgaaactgttctgtatcttgactgtggtggtggtgccacaaatctacacgtaataaagttgcatagaattaaatacacacacgcacacacacgtgagtgcatgccacacatgacatctggataaggcgggtggattgcatcagtgccagttttctggctgtaatattgcactaaagttatgcaagattttacataataacagcaaccactggtaagaatgcagagaattatgagaatggagagaacagatcactcataaattgctggtaggcatgtaaaatggtacagccactgtatttgggtgaagggtataaaggatctctgtattatttcttacaactgcacatgagtctacaataatcttaaaattaaaagttttttaaagtattgagtactccaaagagatttgtatatcgatatgtactgtaccagaaattaacagacattttaaaagtatttattagtctatttttaaggcaataataaatccattacatgctaatataaacaaaacattttttgtgaaatatgagtatatttttcaaaaaacatagtgtgaagagtgacattgccttatatttctgtaaacctctttaatgtctggcttcatggacaactggattctcatgtctgcttctctattatgatgtgttgataatcacacatcatgtagcctctgcagggttttctggaggtacgcagttggcccttgaccaacacagatttgaactgggcaggtccacttagacacggatttgtttcaaccaaacgcagactgaaagtacagtattctcaggatgtgaaaacagcatgtatagagggctttggtttacaggagttccacagggctgactgcgggacttgtgtatgtcctgatttgggtattttcaggggttctggaaccaatcccctgtgtatacagagggatgactgtatgaatctgggctcgattctggggtaaaaccctctgtatacttgtgaaagaaggagagtgaaaaaggcaaataatgcctcggtgttattatgagaatagttttaacctcatggatgctttaaagggtctcagggtcccccaggtaaccccgatcgcatttggtgatgatttgtccatgcgtgctctggcccttacaagtgagttggggcaaggagagcatcttttcaactttgtattccaagtgccttgtacagtgcctggcactcagagagggagagagagggcgagggagtgagagagagagcatgcgccaatctggttgacagcatattgctttagacttctagttctgagtcagagtaaaagtcagagcgttctgatatagcttggtctcatggaacaaacactattctaagaaaccagtttcatgctcctggggcatgaaacatggggctgcagtgatggagtggcctttaaaaagggtcacagtttctcacaagtcttgaccttgaggccattcagaccaagcacggagagaaaggggcttagcgggttatgcagacgtataataaatgatttcctcctaatttactaccttcctcgtaactcccgactcctgtccgtccccaaagcacccattaggggccagtctcagtccacttggtccacagctgctctgggaagtggaaaagaatttcaggccacaatttcagattatgaattgattctcagttctcatccaaagtactcatcaaagcacaatttagccaggagcatagaaaaacgcagatgctgacttgaaattgcccctgaaaaatgtctgttggtatctactgtgtggcagacactgagtcagaactgtgggaatattccaagatgacccagcttggcccctgcctcgaagagctcccgatctcatggtgaaatgatttgactacagctggccagcaacaaggactctaaagtggaatgagcaaccagtgaagagaaatcaactcttctaggatcggggaaaggaagtttgcatttgattttgtttttgaaaggaagagagggatgtggccagtagagggaggacagtgtacgggaaggtattgtattagggaagatagttaattgctttgacatagatctaaagtcacagtggtcaaataaaataggtttctgtcttttataacagtccaggcttatgtattctatggctcccacagtgaccccacagcatgaagaacccagactccttccttcctgatgctccaccacacctgagccccagtcctcatctgtttgcatggtccaaagccatcatatctgtgttccagccagtgcaaatagggaaaggggatagcaggcatactcttccctcctaagagcacatttcagcagttgcacgttttactcctgctcttgccccattggccagaacacagttaaaagggagattgggaaatacagtttttaaatgacggcctctgttgctgtagaaaaaattgggagacaactagaggtttctgctccaagcacagggatgaggaagtggaggggggttttagaaggagccagtagctaagtatgtttaaaaattgttggaggaaggaaatacagtaagaaaggtaggttggggccacagttgccccagactgtggggctacagactttattctgtaaatcagtggttccaaacttaagtatgtatcagtatcacctggaggacttgttaaaacccacattactaggcctcacccccagagtgtctggtttcataggtcttaggaggggcctgaaaatacgcatttctttcttttttcttttttttttttttttgacagtcttgctctgtcgccaggctggagtgcagtggcataatctcggctcactgcaacctccgcctcctgggttcaagcaattctcgtgcctcagcctcctgagtagctgggaccataggtgcgcaccaccacacccagctatttttttgtatttttagtagagacagggtttcaccatgttggccgggatggtctcgatctcctgacctcaagaccagcccacctcagcctcccaaagtgccgggattacaggcgtgagctacagcgcccagccaaaaatacacatttctaaccagttcccaggtgctgctggtccaggaactttgagaaatgtggagccacagaaagttctgaagagagaaatggcatctgtatttcaggaagttgtctgttatagtagagaacaagccgtactgaagcttctcagagcaccagagcttcacaccttcttgatccttcatgttcctgagaaattgcactcaagaaaaacagggatgataaagagcctgcaaagcaagttcatagaatttccaactgcccagggctcaaggattactccccacttcctggcagggctaatggcatcagcctcaactatcatttctttgctttgtgtgcagaagcctggatatgggtggtgtggggcaactccctttcctccctgcacccgggtttctccatcaataataataatgagaatcatttacctgtcttaggtgccaaaaatgatcagatgacacagatcaaaaagttagacaatgtcccaagactgtggagactccagcacttgcctacactgtggagagtgaattggcatggcctctagaaagcaatttgataatcaaaccagaattaagatgctcataacctttgacctaatagttctatttctaggaatggagcctatagatacactcatgtttatttgcaaaagacaaagttgttcagtgcccataatttttactggaaagagataggaaacaacctaaatggcatccatagagggctggttaaacaaaccctggtgcatccaaaaatggaacaatagaccaggctttaaaaatattaagttagagctacatgagcccatttagaatatatacatcttagagcacatctctggaaggatttagagagatagtttgccttcgaggataggaattggaatggaggtccgggatgagaaggaaacttccttctcactctaaccttctgtttacttgtttgattttttctactccaagtatgcagtacttgcttaaatacataaacacacaggtagtgccaggtgccttccatgctttatctcactaaatcttcagaataacctagaagggaagcactcttattattcccaaggcacaaggaggttaaatcattttggggaggggctgcaggagagaggggagagaaggagacttgatttgtagggctgcccatttccatagtgtgaatactctcactgtgactgatttcaagctcccagcatgatgtcactgaacagagttggaaagagaagctcacagtcagctctcagaagcacagaagagccaactccagcacacacaccactgtagggaaccttgcacctgtaaagaaggcaccattgtctctttccacttcattcctgaaagagttggtttccaagaacaaaagaaacgcaagcaaatacatcacttcaggacctaaaagcaactttcccgatccttataagtactggggacttcagctatagtgtaaacaacacgcattgtgttgcaatggatttgaaacagaaacccagaaattaaaattaagcatctgggttttatatttgcaaattgctttgtcattttctttatgaaatactgcacacagctataccaccataaggcaataaaagaataataaatgaatcagcgctagcattctgtcagcacagcttcacacacttatggagggccagcaatctaaattaggaaggtggtttagaaactttgtcagtgctttaatggaagaggtgagtcaagagaatcagacaggcttagatttgcatcccagttctaccacttgctgggtacctcggacaaagcacctcaccttctgagtctcaccttattcatgtgttaagtggggataatgcccaccatacagacttctacaggctggttggaatgtttaagaaacaaagtctggccgggagtggtggctcatacctgtaatcccagcactttgggaggctgaggtgggtaaatcgcttgagctcaggagttcaagaccagcctgggcgacatggcaaaacccagtctctacaaaaattagctgggcgtggtggtaagcacctgtagtcccagctacttgggaggctgaggcaagaggatcacctgagcccagggaggtcaaggctgcagtgagctgtgatcacgccactgcaccccagcctgggcgacagagtgagaccctgtttcaaaaaaaaaaagaaagaaagaaagaaatgaaatgaagttaacatacagtatacacctggacataactcaaggtgttttttccccaaaaaaactcttagaagagagagttgccttatatttaagttcttataaaagctcacagaatctttcatattccctagactctctcaattactttcttttaaacaacaaggtattgttggaggtaggccaatctatagaagtcatctgaaggaagtagttaaaaaaaaagcaagcaattttcgacatggatgtaagtcattacactggggactgacctcacacactttataaagatgtaagccttaagaaagagcacttttaaaagcaatacataaaatgtttggatgttgtgatcacaaatataaaccaatgggagaaatggaaaaacaatctgtcctaagatttagtgcactgggaattctaagataaaatatttcagagaaagcatcatatagaggctcaaaaagtactggatcacaatttggataggagtgaaaattatgtgacctagaaagaaggctgagcgacatagaaatcatccccagtgactgagatcaaaggtgctcagaaagagatgaaaagaattgttttgtgaaatggaagaatgggagaaaatccaatatttctcaatgttgaaagtgtgtatgtacctaaaataataaattaaatattacacagatatttgattatttataccaccttaagaatttatatattcaagttgagaccccaaatattttctcttctgcaatcttcttagtgtgacaagtgagagggacaccttacattttgggccaccctatgttgagacatgtctaataggtgaaagcactttaaatcccacaaagctttgtatgatttgtgacaagtactgttatggtggttaatactatttttattatgacttttctaccacagggtggactctttggctatgctcctctaagcacttctccaggtgggactcccctgaactatttccaagttgtgggaatttttttttttttttttttttttgagacggagtcttgctctgtcgcccaggctggctggagtgcagtggtacgatctcagctcactgcaacctccacctcctgggttcaagccattctcctgcctcagcctcccaggtagctgggattacaggcatgcaccacaatggctggctaatttttgtatttttagtagagatggggtttcaccatgttggccaggctggtctcgaactcctgacctcaggtcatccacctgcctcagcctcccaaagcgctgggattacaggcatgagccaccgtgcccggctaatttcctagctgtatgatcttaagcaagctgcataacttgtctgtgtctctgtttcctcatctgtcaagtagagataataacaggattgagaattcaataaattattatattgagaagtgtttataacagtgtctggtaaatgcttcttaaatgttagttattattttcagcaagggagaacttaactgtttgtaaacacatcagttttcttcaccatatgatgagattttaccaccagggaccctgtcttattcatcccaggatccccaactcaaacacgggggctaacatatagtaaatgtttgctgaacctacaataatttctataaagaaagaaaggtagtatataaagtccagagcccaacacagaccctggttcccattagttgaaagaggcacaccgtgagtgttgataactggctcagcctcatttctcactgaccaaccaaactctaaaacagcatcacagtgcgatagagctggaaaagactcaagactggatgtttcttcgtgtcttctctaaacaatgagttcctctacaataggaactgagttcaattcatctcagtccccagtctggcaaacagtaggggcttaataagtactcattgaccaaatgagtgatgaagtacattctacactattgtacgttacttgttttttaaactgaattttatttttttaaatacctacaaaaaagaactcaaattaatacccaaatatgcacataaaaacttcaaatcatacaaaattatcctgaaagtgaaagaatcacctagggagaattcttggcatctagagtattatttatacaaatgtttccattatgtatacagaaattaacatgtaagtacaaacgctgtatcatgtgctagttcaagatcaagagctttggaatcagatacaccagggttggaatccaagttccatcgctttttagtggtatagccttgaaaaagtaataacctctttgtgcctcagtttctatggaaaatagagctaaaaataaaacctaccctaaggcttattggattaattaattaattattacatatgagcacttagaaccatcagaatacacagaagtaactcaatgaaggttagcaattatgtatacatgtttaaacaaaatgtggtcatattatagatgcttgtttgcatttgcttttttatgtaacaaaatattgtgtacatgtattgtatggtagtacatacagagctaactccttcttttgatgggcatgtatttaaatatatgatgaccctgtgtaaccaagcctctacttttggtattgtttctaatattttattattattttatatatatatatatatatatctcaccacaataaaatccttgttgcacatatatttttccacaccatgtgagtacttctataggataaattcctagaaacggaatagctgatcaaagtgtattaatttttaattatattaataaacaatgagttatcaatttgcctttctaaaagactgtatcactttacattttgattagtgagtgtactttgttgccttatggttgtgtacattttaaccagacgccccaataatttattttgaatgtcccagtagttacagaattaaggactttgccctgctcatttggcattatagccctttatctttccaaaaatcataaacaactcctaagaacttagcaaccaatttcctgcagcaaatattcagatacatagcctgacaaaaatttgtatgccattcccaaatgggagaggaagaaatgtcagacatttcttagccttttcagtggccagtaggaagaacacttgaaattagacccatctattaagttttggagacagggtggctgttatctgcacccatctttgttttctgtaactgagaccctcatttaatagacaagaagcctctctgttgagtattactgggtgcagtgtctctaatccagtgttccccaagtgtgataagggtactattgttagccctccagatgtgtttaggtaatacaaggaggacaggtgaaccccttggccagaagctgaacagcgccaccaagctgacaggctgcttcagtggtggctaaagctcatgcccacttttagttttaatttcaattttaatccaaatgataaatagacataatgtttgagttagataccattacaagttaaatactaccacaaagcttataacaaaaatcctgtttcacctctgatcccatcccagaagcagtaactttaattctgtagttatttttccacacttgattatgggatcgctccttgatttaaatttttttttattaactcacggctatggaagataaggatttagttatctctccttttcttccccctccaccatacacacagacacactttccgtctccaagtctcccaatataattatatcataatttttggttaagtcaaagtgctgttttacatgacaatgacaatgtaatattatttccagctgagtgttgtagtttatgatgattacaatgtttttcttatcaattgtttttgttttcttgcctttaataatcgcttcatgttttatttgcttagtttcctaggtaattcattcagctcctattcatcctcgaattcttaccagaactcaaatcctctccagttccctctgctttgtgctcagtctaggaacatgacagtgtgatgtagtggttctcaaagcatggttccgggataacagcgtcaacatcagcatcatctgcgaccgtgtcagaaatgcaaattatcaagctctacccgagacttactgaattagtcgcactgtgggtggctccagctatctgggttttaatcagctctccaggtgatgccagtggattgggcactcaagcttgagagccataggtctaatggttgaaaacatggatacccaaacctaaggctgctggggtccaaataccaggtattccggtcattggtgatgtagcaacttccaaccctcagtcttcctagttgtctttgtttttcttttgagacagagtctcactcgtcgcccaggctggcgtgcagggcatgatcttggctcactgcaacatctgcctcccaggttccagcaattctcccaccccagcctcccaagtagctgggagtacaggcatgcgtcaccacgtctgactaatttgtgtgttttcagtagagacagggtctcaccatgctggccaggctggtctcaaactcctggcttcaggtgacccacccacctcttcctcccaaactgctggaattacaggcgtgagccaccacatgtggccagtcttcccatctataaaatggggacgaaaacagcctctcccatatagagttattgcgagttgtgtggtgttaggcatcatgacaagctctagcgtttcctggagacagccttcctggagccctctgaaaatccagagccattatgggaggggagctctccaaggcgactgcacacactcctccaggcctccctagtactccctgctcaggggatctccttcattgaggcagccacctcaagcttcagtcttcagcacctcctgctcccaagatcctcctcctatacccctgtgccagcctctctgcctttaaccctctcccacgctcggctcccccttctacaaccaccacaccacctcattcctagcccctacccccatgccacctctgtccttaatcctcagccccaatccttcctcctcactccgcataatccctcttccagccccctggagcagtctcagccccctgtctcctaccttccattcccccacactcctttactccatccacccttccctcccaggacgaagctccctgctttcccatggcaccacccccagggctggctgcccctcgggtgtcctcagccccctgaagtacagagatggatcaccagcctcagccttactattctgccttctcacttgggacggttcttacctatccgagcttcagcactctcgtgtgaaaggagggccaatggggtccagccacatcaccgaccgtaagtgcttggcatatagcaagcactcagtaactccaccattctttccatggcccctgagtccctgcctcgttatggggccccacacatccctcttcctgtgtttcccaccactcttcccccattcactcagctcaggccacactggcctccttgcctgctccctcccacctagggcctttgctcttccctctgatctgaaatgctcttccagtagagatgcaattgacctattctttaacttaaatcaggtccctgctcaatggtcacctccttagaaagctttccccaaaccacccattctagaataccatcgaccccatcccttgctatcttttttttttttttttttttttgagacggagtttcgctcttgctgcccaggctgtagtgcaatggtgcaatctcagcttactgccacctctgctttctgggttcaagtgattcctgtgcctcagcctcctgagtagctgagattacaggtgtgtgccaccatgcccggctaattttgtatttttagtagagacggggtttctccatgttggtcaggctggtctcgaactcctgacctcaggtgatccgcctgcctcggcctcccaaagtgctgggattacaggcatgagtcaccatgcccagcctccatcccttgctatcttttgtttactttctggtccctaatgggtctactgtgatgtgggactgcataactgcactgtcatattgtctgtgtcagcccctcaaggcagacactgagttttctcctgctcatccccatacatcagctcccaaactgccttgcacatagaggagtaagggttcaaaaaatgttaaatgaatgacttttcttacagtaaaagtgtagccattgctttattcagccagtgtcagcgactccttgagtgtagagagcacaaccaatgatgtgacattccatgcagctctctgtgctcagcagagaaaggacttccttccgcatccctggcctgctaaaagggctgaaaacctcactgcttggtcggttacggtggctcacgcctgaaatctcagcactttgggaggtcaaggtggatggatcacttgaggtcaggagttcgaggccagcctggccaatatgatgaaaccccatctctactaaaacacacacacacacacaaaattagccaggtgtggtggcaggtgtcagtaatcccagctactcgggaggctgaggaggagaatcatttgaatccaggaggtagaggttgcagggagccgagatcatgccactgcaccccagcctggacaacagagtgagactccatttaaaaaaacaaacaaaaaacctcactgctgctcttctcttctacatttcttctatcactaaatattgagctcagtcagatgtttggtactgtctgaggttccagggatactgaggcaggcatgtttgtcaacaagaaagatgtagaagagggctcgctgtaacgtttacactgcttagcctggggaggggctgagtgcgatcaagagatgtggagtgtctggggcctcagtttgaaacccagctgtgccagcttcacattcggtttcttcatctgtaaaatggggctaatgaaagtcactacctcatggaattgtcgtaattctttgttaatccctgtgcctggcagacagaaaactttagtaaatgttggctattagtcctaacagtaaagtataggttacttccataagttaagcaagacaaaaacaaaaactaaaaatttggtcaaggcatcaaatgatttatcaagcagtccagccctcttaacagcatataaaaggattcacactccttgtggtcctcccagaacttcatattcaatctctctcaaaattcaggtgggggatacagctggaggccattatcctaagcaaattaactcaggaacagaaaaccaaaaaccaaataccgcatgttctcacttatatgtgggagtaaacaatgggtgctcatggacataaagacaggagtagacactgtgtattactagggtggggagggaagggcaagggtggaaaagctactggttactatgctcattacctggacgatgggctcaactgtatcccaaaccttagcatcacacaatatatgcatgtaacaaacctgcacaggtaccccaaaatctaaaaaaacaagctggaattataaaaagtaaataggccgggtgcagtggctcatgcctgtaatcccagcactctgggaggccaaggtgggaggatggctgagccaggagttcgagaccagcctgggcaacatggtaaaatcctagtggcatgtgcccacagtcccggctactcaggaggctgaggtgggaggatcacttgagcccaggaggtcaaggctgcagtgtgccatgatcatgccactgcactccaagcttgggcaacagagcaagaccctctctcaaatagatggataaataggtaagatgcctaaaaacaaaataaaaacatgtatatgtgtattagaaaacaaaacaaaacaaaatcagataggaaaactagccaggaggaaagacactgctggctgtgctaaacctacgaagccagtgatacaggaatggggccagggccacacaatgcagccttctgtccttagaaacttctaagtaaagacacaagtgttcgcagctacagggttttggcttttttttttttttttttatgttttaattcaactttgtcgtggtacaatttacacacaataaaattccatcacccagaaaattcccctgtggccctcagcaatcaattcccacctgaaaaacaaccactgatacgatttctgccactctagactattgttggttgactttatattaatggaattatagtatgtgttcttttccaatttttttatagctttattaagttgtaaaactgatttacataaatacacctaatataaagggtacaatttgaagtgttttaatatattcctatcttgaaactattactacagtctagataacccatcaccccaaaaagttttatgtccttttgttttctatccacccttcctaccccaactactgatctgctttctgtcactacaaattagtttgtattgttaagaattgtatatagaatcatctagcaggtactctcttgtgcctggcctctttcactcagcataattattttgattcatacatgctgttgtatcaatactttattcctccccccatcaacacaccctcagcaacatttcattgtatgggaataccacaatttgtttatccattcatttattgctgaacactgcagcattttccagtttggaattcttatgggaaaagccactgtgaattcctatacaagttgctttattaacagaagttttcatttacctgagacccatggaattgctgggccacagggtagacatatatttaactttataagaaactgccaaactggttttttttttttttcccaaagtggttgtaccattttaaaatcttaccacatggctggtttcacaagcttgtatccatctcatggcttttgtacttgttcttctttcttcttggaatgacttcccattcggtttcagagctgggttcttgacattcaggtttcaattcaaatgtcaaatgccaaagaggctattatggactgaattgtgtccctcctcactccaaattcatgttgaagttataattcccagtaccttagaatgtgcctatatttgaagataaggtctttaaagaggtaattaagataaaataaggctgtcggaatgaaggacaaaaaccatactatcatttcaattgatgctgaaaaagcatttgataaaattcaacatggtttcatgataaaaaccctaaaaaaaactgggaatagaaggaaaatacccccacataataaaagccatatatgacaaacccacagctagtaccatactgaatggggaaaaactgaaagcctttaagatctggaatacaacaaggatgcccactttcaccactgttattcaacacagtactagaagtactagaagtactagctagagcaatcaggcaagagaaagaaataaagggcatccaaataggaaaggaaaaagttaaattatccttgtttgcatattatatcttatatttggaaaaacctaaagactccaccaaaaaactgttagaactgataaacaaattccgtacagttgcaggatacaaaatcaacatacaaaaatcagtagcatttctatatgttaacagtgaacaatctgaaaaagaaatttaaaaagtaatcccatttacaatagccataaataaaaatacctaggaattaatttaaagaaatgaaagatctctataatgaaaactataaaacactgattaaagaaattgaagaggacacacaaaaaatggaaagatatttcatgttcatggataggaagaatcaacattggttaaaatgtccatactacccaaagcaatctaaagagtcaatgcaatccctatcaaaataccaatgacattcttcacagaaatagaaaaaaggttatggttaaaaagaccttctgatcaccattttgcaactgtaataattgtttcaagcaagaatcaccatgaattctgaaaccagtgggtaagagtctaaagaagaggatatttaaatagtctcaaaatatcttcccacagaatacttaatagttacagaaggaaaaatcgtaactttatggtagagtgtaactactcctacaccacctcaaccaaatgatggaagttaacaccacgaatactgggacaaacacaatgccatgtgcctcctgatgaaaggccctgaggaggcaacttttttcagcagtagtcctgccaaaaaatgcataccctctcagaatagcaagggatgggttggtggggggtgggggaggagagaaaaatggatactctgaaactaataagaaaacacagatgaataaaaatttagggacattctacaatataactcgccagtattcttcaaaaatgtcaaggtcatgaaagacaaagaaaggctggataactaactgcccttccagattaaaagaaactaaagaggcatgacaactcagtgcaacgtctgatcctgaattggatcctggggaatagctataaaggacattattgggaccattagcaaaatttaaatatggatggagtgtattaaataaaacaattgtatcattgttaaaattcctgatttttgaccactgtactgagattatgccagataatgtcttttttttaaggaaacacacacatatatttaggataaaggagtttgatgttggaaactctaaaatgatgtagtaaaaaagaatatatacattatatatgtgtgtgtgtgaatatctatataccgtatactgatttcctttcttttggggtatataccatatagatatccacacacaatatgtatttgtgtgtatatatacacatacacgagaggatatggatatgcagcaaaatataacaatttgttattctagtggaaaagtatatgatctttacgattcttgaaatttatgtgtaaatttgaaatttaatcacaaaaaagttaagaggttttcagcgaccaaatacattataagaaatggcctgtatccagtgagcactctttagctcattctttttctccatcacacttaccactggcaaaaattatcctgtgcatttatttaataatacttaacattgtgtgcaaggctgtcctaagtgctttacctgtataacctctgtggatcttcttacaggtaaggaacaaatacacaagaaggttgactaacttgcccaaggccacccatgtggtttgtctcctgcagtggcacagaacctcaaccaaggcagaaactgccttgtctattgctctttccccagcgacttggaatggtgcctagcacattacgggtgttcaataaacatctgtagattcagttaacaaacactgggcacccactaggcctacactggaatacaaaatacagaacaaaatattcaaaaatctgtgcctaaatgggagctttgggtactaacagccccacacccaattagcctccatctaggtatttcatttgggtctatcattcctgggaattaaagcccattctatccattttgcagaggatcattagataaacggatgctcagggtgggtcaatgatttgcacaagatcactgggctggtagaagggaaggtcgggattccaacccagtccctgaggttcccaggacagagctatgaatcaaacgaccaagacaatcacccagtcagtatttattaggcgcctactgcggacggttggtcttcacgcagatcaggcgagaagggatagtgatgcgcgggccgctgcggagacccggagcccgccgcggatcacgggaatttcgcgcctattttttgttggctgggtgttctcgccagtgattgggtcccggcaaggcgtgccggtgcgctcggctgcggctgctccgtcgacctttgcaggaccgggcggtgcagggctcactcggctggcgtcccgggggatgggccaccaggagtctccgctggcccgggcgccggcgggaggtgcagcttatgtaaagaggttatgtaaagggctcagctggcgcgaacacgtggaaagccacgggagcctaggagcccaggcttccccagcgagcgccgcggcagcagaaggatccgctacacgccgggctcgggccgccacctcccgcgctgctcggtcccggaggcagcccgggcccggagcggaccatccccaggcaggggctccaggggggaaacgggccgcccggaagtggaggtgcgcgggccaggtaagggcgccgttggaggactgaaggccagcgccgaggctggagttactgccactgcctccgcgcttgggaagggaaatcgggtcctcggccagtcgcactccgagaagccgaacttttcagccaatcccttctacccgtcgccctcggggacttgggtcggtccgctgggctccgctagggcttaattcaatggactgtttacacccgggcgaacacaaggcggggcgcggggaggagcgtcacagagggggccaagcaaagaaaaatatttccgccggccaaatcgcgtctctaagcggttttcagaaggcgtgaagcttgctggctcttctttttcctatcgctacatgacaagctaacagagagagcggagagtttgtgcttttctttccggttccccctctgagctgctgcccagtggttcggtctttcccgctttcccctcccctcccccgttcaatcagcggcggtggcttccgtcttaaaggggccgcggcggccgggggaggaggaggtgggacgccccgcggcctacgctcctggcctccccgccttggcctggccgtttaaccgattctttcgcccgcaggtcacaatccaaggtccggctcctccgcgtcccagggccggacggagggatgaggcagggggggcccgggcagcgccgttgctgctccccccgccgcccgcagccatggaaacggggaaggacggcgcccgcagaggtacacaaagcccggagcggaaaaggcgaagcccagtgccgcgggcgcccagcacgaagctgaggccggcggcggcggcccgggccatggatccggtggcggccgaggccccgggcgaggccttcctggcgcggcgacggcctgagggcggtggcgggtccgcgcggccgcgttacagcctgttggcggagatcgggcgcggcagctacggcgtggtttatgaggcagtggccgggcgcagcggggcccgggtggcggtcaagaagatccgctgcgacgcccccgagaacgtggagctggcgctggctgaattctgggccctcaccagcctcaagcggcgccaccagaacgtcgtgcagtttgaggagtgcgtcctgcagcgcaatgggttagcccagcgcatgagtcacggcaacaagagctcgcagctttacctgcgcctggtggagacctcgctgaaaggtaggagcaccgcgggcctttccacccacgcagggcctggaccccctgctctccggacggcttggcccacactgttcctggccttcctaggcctcagacctggtccctgtcaccctgtgccctgacacaccctcctttcctgggcccaggcattcggccctctcttctcaggtcctaagatcagtccctgggcctaaagttggctggtgtttccataacaagagctcgtttaagtgctaaccattaacttaataagtgctcaagaattgcgagctatggttattaaacgtcttctatttttaagatcggttgggggagtggaggaggggtcgggttcagttagtagcagaactgcggagcctcctcacccccgagggcctctctctttccctcccaaaacaaacaaaaagaaaaaacttgactggacccacccacaccctctccctgtctggttccaagtttcctgacaccctccagctccaacccccaaactcctgtggcttcctcgtctgccttttcctctgaggcccccggcccttcatcccaggcagccgagcaaactgactgtcttctggcttggtcctctgaggggtgcaggctgacaaccctcacaggtggcctgagagctgtcacataacaaagcatccggcatcttttccctccgttttacattcttaatctttttcttaacctcagaggctggctgggaagtggttttacttaaaaggaaaatggggtacattgaggcaagaggtcttgcagtcctggaggaactaattatcttagtttccgggttttaactgcagttagggaatgtattcatcctaactactcagtactcacaagcctttttcatactaccagtagctaagtgtctgcttggagaggagagaggcggtagaaagtttgaggagactttccgaggcaggaggatccaggggaagaaagtttactaatccgagtcccagctgtggtctcagtgctgaagtaatttttaggtaataacttcaaaagtaaattctatcctttttctataaataaactaaggcttagaagtgaacaaataacttgatcagggttaatccgcttgaaagggaagttagactgtactcctggtttccttacatttctcagagcttaagtgacggggatcccagatctgtcttgattcgaggcctggatcctttcgaaggcgtaatgctgttctctgcaccctgaggatgaacttttttaagagtgggtaggatttggggtgagtttggagggggtggtttcccaaaatcttgttacttttgcacaacttaaagatcccccaagtctttcccaagagaacgctttgtcccattgcaagtcagttgtttgacagtggagttggaaacatgaatcagtatcacctagagtcctttaattagatgtctaactttataaagtccatccgtgccccatccattctgagaagcctaccctctccccagggtgagtgtttttgttttgaaaagacttccagcagggcacaatggctcacgactgtaatcccagcactttgggaggctgaggtgggaggatggcttgagcccaggagtttgggaacagcctgggcaacaaagtgagaccctggtctccacaaaaaatagaaaaaaaaatagccggacctgatggcacaggcttatagtcccagctacttgagaggcagaggcaggaggatcagttgagcctgggaggttgaggctacagtgagccattatcatgcaatggcactataacctgggcgactgagcaagaccctgtctcaaaaaaaaaaaaaaaagactccctaggggattcgtttatcttacctatattctaggagcgcatcacttactttgaagtctttctattctcagacttctcttagtcttctcctttactgccaatgaatggtctggacttcctactacaggattgccttgggatgtaggaatttgccttgccgaatgtttattccttgtgtcctcagttcattgacgccagtctcgaaccttcaacctcagcttgaagctcttgcttactctctcaacatataaatactatgtggactttcctcacctgaagaatttgtcaaaattccaaagtgaccccatggcagcatagcatagtggttagtaccatggactttggggttagaccctctggctcatcccaggactgactgcacaaaacatggagcaaattgtttgaaccctgtgaggagcattcctttattgtaagatagtgggtatgtacctatgacattaggtacatagggtcactgtgcaaactgttaatgtcagcaagtgctccacatagggaggaattcactgccttatataagttcacaccatgttctgtactcttctaccctcacccccttcaagattcacattgttcttgctcaagtttcccaaacttgtttcatcatagaacacaccttgttttctgtgttgtcaggcacaccaagttgacagaaacactggtgttttcatcctccctttgtgaactaaaactgggacctagaaaaatgaaatcttttgctttaggccgtacactggattggattggtccctttcagttgtttggagtctttaaaatatttgaacctctacggtgttcagggctcagagacagagcagtgaagaaaatatgtgttgtttctgcttatgaaaatgacattcaagctgacttgcaatgtgtggatttttcaagtagtaaataggtaatcatttttgcttcttaaaatagagaacagataccaaaattactccaggttaaactttgcttattctggattccaaaatttaggggtcttgatctgtcctggggccttgggtttacagcatgcaaataccacccagtaatgttaaagctggaaggaatcgtagagataacctggttcagctctctcattaaatagaaaagtcctttacagtcacccttggccctgcctcctaaaactcagaatgattttgaacaggccaaaaagtgtgaatctgccttgaagtctcaactaaacctaatgctgagtccctactgtggtatttgaagggaaagaaaaaaagcaaagcaaaacacaccaccccttgccccaatggaacttacatttgaaaagtttgagaactggaagaagatttaaatgctattcaagatcactggaggaaatgaccagtcaactcataagcaagggctttgcacaagaattaagaggaaagagaatcaggagttagggagaaggtgggcttgaaagtagggtgcctaggactgtggataggcgaagagacaaagggagtccgtttcactatttggccagtaaaataatccagtatcgaaaagagaaatgtcttgaaatgctgttcttggtcttaccccattttgtttgatagccttaaatgcattgtctccttccattctgtgcacagaccaaacacgtcctacccagaggcattaagacagcagaagcttcggaggaatagaaagaggtcttagatgtgtgacctggctgcctgtttcacaaggaaggaaactgaagcccagaaaagggacaaaacttttatccacaatgagttagtgatagcactcaaaccagcctcccaggctttttaaaaccacatttacaatcctgtaaattatttggttgaagggttggtgcctatgtttttaactttgaaatacttctcacataaaggttgggggggtgaaggcatcaacagtttgcttttatccccttgttttccattgcgagaatgcctgtcctgaatgtgcctaaaacaaagttcaagattactgccacttagacagcaggcaagcctgagtcactgtcagtcagaaattctgttgctttgtctaaggcacacactgattcttctgacaaatagcaagtgaggacacactcacagacactaatccaggacaaactctcaagactcatataacagaatagttagaagtttgggagagccgggagcctagcttacactcaacttgataagacactaattgttctttaccaattgtttgatgtcgatgcctttaggtggctgggaaccgaggccttggaaagtaatcttgcctgcacaccaagtggctttgagccaggctactataagaggccatgcagagtttttctccacgaggcatgcagaggacgcatgcccacatgaacataatgcagggtcacaagtggtagcatcttagaaaatagtacagttgtctgggagtttagttaggggcattggggaagcaggggaaggaagaagctgagggaggaactataatagtataggatagaccagggtcttagcaatagatgggttgtcagcctgcaaacttccccaacttgtcgagtgcctagggaaccttcagagcagagcaaggccgttccctccccagcccttagaaaagcaactctgaatcctcttctgtggcttgggtctcagagtttagagagccgccaggtcaagaggcagagagctggctggcattggggaaatataagttaacacaatacaataaaatgctagactcagagtcagaaggttttaatcccagtttcaccctgtaaataagagctgaaacttgcaggttgctatgtatcaggtgaagtcagtaccgtgattatcttcattttataggtgaggcaactgaggtaccaaggttagtgaaattgcccaatgtaaaacagctaagcaagtaaccaagtcaggattcaaggccagacattcaaacttgagtatgctttcttaactgctgtggggtactgctgggacaggtagcttaagttctaggttcttctgtttttcttggttgtaaaatgggcataatcatattttactcagaaactaatggctcaggccgtgtgcggtggctcacacctgtaatcccaacactttgggaggccgaggtggacggatcacctcaggtcaggaggtggagaccagcctggccaaagtggtgaaaccctgtctctactaaaaatacaaaaaatcagctgggcgtggtggcgggcgcctgtaatcccagctactcaagaggctgaagcaggagaatcacttgaacccgggaggcagaggctgcagtgagctgagatcgcatcagtgcactccagcctgggcgacagagcaagactgtctccaaaaaaaaagaaagaaactaatggctcctctttgtttttagttgtatattgatcagtgcttgtggcactgctgatttctgttggttccttctgtgtgtctcagctgccagggaccccacctgctctctgctctactcttgaatgacttggggcaaccacacagacttcttgctcctgaccgactactttttatgtgcattggggattttaggtaccagccccaggagacagaagcagcccttccttaattgagagctttggttaattggggttgcgttgggtaaggctttttatagtataaactctcgaggggtgcttcctaagtagaacttgtagtctgctcatattcacctcaaatgtggcctttgctggtatctgtagggctaggaaccctccttagtgacttctaaattctggatcctgacctagttgtctttaacttgcatattctgcataccctactactactttctgtgttctttctctttttacacctctccagcgcatgacttttatcttgatttatttcaccctcttatcgaccacctaggtgtgcatgtggtatactgtggggaacccagagacttgatttcattccaccgtgagtgcccagtctaatggaagagatggttacagtacaatagatgttacttcactgcagcctgtaagaggtgctctgggtgaatcagctgccaggaatgtggactaaatctggggaaaggaaggatgagttgtaaaagggtaaatcagaaacaagcctggcaagagctgaggcttaggtgtgtggcaaggcccatgcatatggagagagatacttgagcccggactgccatggattaggggtaccccaactctctgcctggctggtggattctacattttaacaaacccctgtaatgttccaagtagtaatagctagcatttcgtagtattttcatactccttttctcatttaatcatcaccactgtaaagttggtgtttatataacttgttcttacagacaagaacgtcagtgtccatcaaggtcaagttgcttgtccagcacaacactagagaaaggtcagggcctaggtttacatccagatgctctttccagtgtccatgttcttgacaggctgccttgtgaccgtgttggacagctgccagtggtgtccagagacattagcataattcacacccagtagcagtctgctctagtgtccaggcaccattcaaggtgctttgtatgtcacagttaagccttagagcagtccagtgctgtaggtgtttcttctcaatttataaaaaactaaacagattcttagtgttctaagaaatttgcccaggatcatatagctatgtaattgggggattgggggcaggtagtagagggaatgttgaccccaggcctggctggctttacagcccctgtccggccggtgggtttactcttgtcctcttttggacactgtgttttgccctggcagccaacagaacaagtctgttaatcttaggaagtactttggacacaccctgtggtgttgctatggtacccagcctctttataatgacataacagcacaaaatcattgagaatgggaccaattcttggtctgcattttcatatttctttgggaagatgtgccaggatgggtccgtgtctttagcttcttaggacagatctttggctgagccagctctttaactaaaatattttaatgtacaactcctaattaaacagggatggctatagtcataatttattcaaacttcatttttcggggttccctcatcctttttcttaagacataactttataattttaatattctgcccttttccccccttcacattaaaacttgcttattacatgctatgtgactttctcttttggctttttaagtaaacttttgttgaagtataatatggtcctttaaaactttcagccaattggtattaccatagttaactgttactcattctcattcttggacagtagttttccaatcctccactttgacttactctgtatggaataccagttctgagtgtctctggtgtttggtgtgtgtttttttgttgggtggggaggcttgtttgttttgtgtctttttgacacttttggaatgaattcctcaagtgggatttttctttcaaatggatcgagcatttctaagacttcctatatgtattgctgaattgctgaagtgtgcgtaagtcaaagtcctaattagtcctctgctgaaagacagatctgcatgttgtgtggttggaccatcacgagggactggatgaacattaaactctggggggcacgcatcagagtctgctgtgggaactagcacatccaggtgtgcgattttgctgcaggcactaaggcagtcacagtgcttctgctgagaatctagcctatggaaactcaaggtcctgccctcaactaggcaagttacttaatcttttgctcctgagtctcctcacctgtgagaggaaatgtaattattatctgaatagatagcagtttcgagtaaccagagaggaatggcagagcactctctgaattcttcctttccatcttatgtgacaagttattaaatcttatttatcctaaacttctaagacctttcacatcctcttctcacctcctcccttgccagccctcacttcaccaggtttcagagcctcttgataagtcagtcggccactaggctgtctcccatcgccaacccctcatgcctccataaggaacttgtttcattgtccaagatatgctctttcacagtttaacgtctctgaaatcagcggttgacttagtcaatggtgtgcccatagcgttgtcagcagcctatatggcttacttaaatggtatgccttaaaattggtgacttgtagattctgtaagcgacacatctctaaaatacgtcagtggccaggcgtggtggctcatgcctataattacccagtacttaaggaggctgaggtggaaggattgcctgagcccagaagttcaagaccagcccgggcaacataaggagaccctgtctctactaaaaatagaaaagaatagccgggcgtggtggtgcatggttgtaatccccactactctattcgagaggctgaggcaggaggctcccttgagcccagaaggtagaggcagcagtgagctgtgattggctgcactctggcctgggcaacagagctagaccgtttcaaaataagtaaataaataaaatgtattaagaactttcagtcacttcccatttcttggagtctaaatccaccttagaagatatccagcctcattccggcacatctacagaaactcttctgtgattatccagactactcgtgtccctggcgcacacccacctgctcctgtgcccactcccctcatcctgggagacgcagctgcagggcctctcgcagttattctcagcctgccttcctctcatcccagcttctctcccaactcttctggcagatccgggcccgcttcctagttctcacagctgtagtcattctgcttctaatgaccagaagcctatgtaagggcagggatgcccctcagctcaccgcacctctgtctcaagagcaatgtgtgctcagaaattgttgaagtggcgttgactaaaacctggaaatctaacttctggagaaggcttaaggataggcttgtaaaaatctagagcattttgtatttctttacaggaagtgcctgtctttccaaagctcctactggcttgtctttatgctgagcctgctggcctcacgtttttcagcgaagcaagccatgtttttattgggaacttaagcactactgatgaatttccatgactaatgagatgcaagacacctgcttggttttgttcttgggtttactttaagcatcttctctccctgtggactgtggcataggatatgttttgaaatacataatttatattatggtcacctgactgtcagacttgagggaaaggtagtaaaactgtccccaaaggcaggcctgcctctcttggaagaacactttttagccctctgtgagctgggagacagcatggtctggggggaggacttgctgtgggggttctctcctatcccccccagttactcatggtaagggccctcgggcagactctgaagcctttctcagccttagttgccccacctgtaaaacggtgcctggtaagatgagatagctcacataataaacttttaaaatagtacctggaacccagtaggctttcacaggctaatttacctcaaatccttactatctccaaataacctgcctgttttctccctctctgggaaggaagctaaatttgtaactcttattaatcttatacaactgtcagattataccagacaagggaattataaaacttaagtaaattttatttgttcctctcagctcaaaaaactgaatttcatgtggggattttagtggttgctgcatatatctattccaattatatatcctgaaactggggaaatacccgcagttgtgggtgggtcgggagcccactgtgagatgggcctgagctgaaactccatggatcacctgccctccatcagtcctgttctgactggtggaccacagtgacagtttggttctttgggaattagtgtctttttggaacttgtgttcagtaatcccctaaagtttgattactttcccttcctcaatgcacaggcaccttggaaatgactgcaggtctccctggggaggccggaagactgagtaagaaatctagtcccccgacctcaaaacatctgcagaatgtgccagcatttctcagggttaagtagaagagttaagccatagattgctaaccagaatatctggtataatttaataaaaactaaaataaaaatatgaaactagggccttggctggtcagaagagggaagttactgggaaatcaagtgagtataagatagactggtgttgcagctagccttaaggtgcacatttcaattgtacctgcagagattgtgggggcagcaggcctagggagagggatcacttcaaataggaatagcctggtctgcctagaacatgggtttcagctgttacagcctaagaagtgtgatgtcttagatggaataatacactttcattctaagatctaaatttcatcttttgcctaacatgtaaaaacttactcttacggcctacagcactgggattattgaaatcggtgacttccaaggatttggttggggttgagtgggaatgatgatgttagtgatggtcagtggttcatttccccaaaaagatcttacattctgccaaatgtagttcctatctgacttaagtcacagtactcatgtggtatagtttcattctctcatttgatagatgtgaagactgaggtaccaaaaagactgaggctcagagagcttcagggacttgcccagggttccagccatcttttcatcacacctcagtctccctgtgttttccttgaaacaaagaatccacccagtgaggcagtggtcagagttggggtctgaacccaaactctttgtttcctggtctgtgtttttcctgttacttcaccaagtgcctccgagtgcctggcatcatccacgtcgcctccttccatctggtcgtgaggtagctgagaccccgttagacagtctgcttggagtaaaggactagaattctgacatgtttgttttctcccgggagttcgtgtgtgaaagcatacgctgcagcttctcatgaaagaagtccaggggcctttcctgcgcaaagaagtacttttgaggccaggtgctattgagaagctgggactattgaggccactgcacccggcctcaaaagtacttcttttggaagtacgttgggaagccaaggcgggaggaccacttgagcacaggagttggaggctactgtgagctatggtcacacctctgcactccagcctgggtgacagagtgagaccttgactcgtaaaaataataacacttttgtatctgggacaaatagctgcactcccagttttccattctgtcatacccactgttactgggtgtgattctgagaatacttcttcctgtccagaattttcctctcaacaaacagcccctcctgtagcatctcctgagtctagctccttcctcagagcagctcctcagtccgaaggtccagtctcccccaaccactcacaaactttgggttctttttttaccattttttctttccctggattctcataacctggacttagattatagtctgttttgcagacttgttttctttttccttaggttgccatagttactaactttgtatataaaataaccatcattcctcttcctttattcccccaccagaagtttcagtgttttctgatgtggcctttgcaaaaggaattggatggctttttgatcttttcctttctggttctacctgtagtacacatttcttgctctcctttttgtgggtctttagcatctggattgacttgggcttcagattgatgcttcattgtgcagtatttttacatagagggcctctgcccatgacctagatagaggattatgagaggggaaataactgatttgaaaagaacaaaaaacatctgccctaaactggttctacctgtattactttgattgtgagtaatataagcaaataaattatataattacaagggaagtgagggctatccgattgtgatcaaaaacctaaagcttttgttttgtgtgtcacatcatcttggctgaacccagaactctcagaccattggctttagtagactgtgagccttggtaatttcaggctgttggggttagcagagcctcacctagatcactcgttttctttgtaatagagtaaatgactagtaaaaggaaccctctgccagaagctgtctgaggaagtgcagtcatttttggtaggatgcatactccatactggggccagagagaggacttctcttcaggtcctggctcagttacaaatgaccttgtgaccacccagaacaagccagcacatttgcaggcccagcctctcctcatcagtgagataaaacatctgccttcttacacttagctttgggagcagttgtagtcatcacataacatccacataaagattcactggactgtcagttgctttataaagaacattgagatttgcttggagaggttggtcaccagctttcctagagtttcaagcccacacaatttaaatctgtcttgtacatcgactttagactccactgttcccaccagacttccaatttacacctttctggtctttttgtccctgtgttccatcatccattccatctttcagcctagaattaccttcctgctcccccactgatctactgcctgccttttacagggtaagttcagtcctgccccctctgacaccttcagatctggccactcctgccccccccttcactgtttatatgagttgaccctgatggagatgtacattcagatctggcgactcctgcctccgcttcactgtttgtagtagttgagcctgatggcgatgtacagcttttgatggttgctgctgtggatacctgtcatctccttgaaactaagcctcatagaggtggaggcatgttatgtacctaacttgtgctaggcatgtggtgggcttgcagaaaatattgatggatcggactgtgcctctgaaataaaccaaggaaattgtaggagtgtgcctctgaaataaaggaaattctagtgccattctaggtgcattaacaagaatccttctacaagtcaggaaaaaagagagggaaggtcatttgctcagcatggagtaacaatgatattagaagcaacagacccgtgacagccttcttgcatgctttcccttgtcccatctgcccagcagctttgggaggtgtgggtggtatggcactccctgtttggagacagtataatgaaacaaaaaggcttcgcagtcaaccagacggcagtaaacccgagtttccacctgggcctcattccaaacccaggtacctgacaccagtccctggtgcctgtgtcataccttagaaaggcactcagtgccagttgtgcaggtccccttggagcagttgtttgtcaccaatgtcactcttgaatacactgcatcctttagttaaaaagaagtgtgactgtgtccatctcactcaagctccttcctgtcttctttgatttaggagaaaggatcctgggttatgctgaggagccctgctatctctggtttgtcatggagttctgtgaaggtggagacctgaatcagtatgtcctgtcccggaggccagacccagccaccaacaaaagtttcatgctacagctgacgagcgccattgccttcctgcacaaaaaccatattgtgcacagggacctgaagccagacaacatcctcatcacagagcggtctggcacccccatcctcaaagtggccgactttggactaagcaaggtctgtgctgggctggcaccccgaggcaaagagggcaatcaagacaacaaaaatgtgaatgtgaataagtactggctgtcctcagcctgcggttcggacttctacatggctcctgaagtctgggagggacactacacagccaaggcggacatctttgccctgggcattatcatctgggcaatgatagaaagaatcacttttattgactctgagaccaagaaggagctcctggggacctacattaaacaggggactgagatcgtccctgttggtgaggcgctgctagaaaacccaaagatggagttgcacatcccccaaaaacgcaggacttccatgtctgaggggatcaagcagctcttgaaagatatgttagctgctaacccacaggaccggcctgatgcctttgaacttgaaaccagaatggaccaggtcacatgtgctgcttaaaattcagggctaagcattttgggtgattttaaactaggtgagtgctctctgttgttgttttttgttttttgttttgagacagggtctcactctgttggtcaggctggggtgcagcgggtgcagtggcaggatctcagctcactgcaacctccacctcccgagttcaagtgattctcgtgcctcagccacctgggtagctgggattacaggcacctgccatcatgcccggctaatttttgtatttttagtagagacggagtttcaccatgttggctaggctggtctcaaacttctgacctcaagcgatctgctggtctcagcctcccaaagtgctgggattacagttgtgagccaccatgcccagcctctcttttttttctgtatgcccacttcttggaccgggttcttcattctggaccctggcatgggccctgtgaacttgcaggggaatacaaagttgaagaaaatgaagtgcttcttttcaaagatcccccccatatcttgatgggagaaacgtgcaattatctgagtacacgttggaaagtctagagaagtcttctcagaggaggttgcgtttaagccgagtctccctttttttagaaacgctctttctcatcattataaatgctcactgtagaaaatgtgcataagaggtagacaggttttcagagaataaacactatctctgattgtatcccacctactcacacatccggttccacatagtttagatcttgccctagttggtcaaggtctttttctttttactcattactaatctgagcattcctccatgtcatactttagaagtatggcttttcagggactgtatgacattcccattatatgtaccataatttaaccattctcctactttagaaaacagattttttccattttagatactataaagaatgtattagtgaatatttatgtagaagtctttgcttatttaaaaaatttattccaaggtgggcggatcacgaggtcaggagatcaagaccatcctggctaacacagtgaaaccccatctttactaaaaataacaaaaaaatcagccaggcgtggtggcgggcacttgtagtcccagctactcgggaggctgaggcaggagaatggtgtgaacccgggaggcggagcttgcagtgagctgagatcgtgccactgcactccagcctgggcaacagagcgagactccgtctcaaaaaaaaaaaaaatttattgtgagttttcctttgtgaagtacagtcatgctccgcatgaacaacgttttggtcaaaaaggaatggcctatatgacggtggtcccattagattataatggaactgaaaaattcctattacctagtgatgtagctgttgtaatgttatagtgcatattatggtgtatgtgttaccttttctgtgtttagatacacaaaaacttaccattgtgttacaactgcctatagtattcagtacagtaacatgctgtacagaattgtagtccaggaatgataggccatacatgtcatctaggtgtgtagtaggctacaccatctaggtttatgtaagtacactcttgacattacacaacaatcgcctaatgactcatttctcagaaatcgttaagcagcccattgttaagcgacccataactgtatgtgctaggctctggggtgacatgataagccaaatcagagactttctccatcttcatgaattctgcatcttaattagggagagaaactccaagttgaacttggtttcatgtgtagtattttcaatgaaggtatttttgtaatgagtcactaggtctaattcttcaaatcataattgttttatagctgtttaaggagaagaggtattcagggaaattgacctttcgggtgttgatgcacagagtcaagaggagggaattgggggtgagggagcatcccagatagaccaacctctgcgaaggacctgaaaccagggagagcctggcacatttgagagactagaccaatttgggttaatgaggaagtaggcatgtggaaattagagaggacagggaacagtgtagacagaaattgaactggaaaacccaaaggtatttataggaacagcagaatagtttagttggactgaagtttgatgtgtgtgtaagagaaataagatgaaaaattgaccagcatatatgctaggtagtttcacatgaaccattttgtttcacctttacaaccctgcaagggattaagtaatttaccccagatcctactaagttaaggatgggtatatcttattcaagcatcccccacccccttttcccttaatatggtgagctagaagtaagctgctcttacgttgtgctgaagtcttgatgaggtgatggagctagtgctgatcctcctggtggtcacaagaagcctcaggagccataaggcacggagctttccatcacttgggtgggttccctccctttcccttcattatcctctggtttctaggtggggttggctcattccaagttgagcttggtttcatgtgtagtgttctcagtgaatgtatttctcgagtgagtcacttaggtttaattctttcattctacaaacgtgtgttccaggtgctggaccaattgggcctaccacccgtgggtaggagaacagcagtccccaaagctaggtttagggtagtgctatattagaaaccaaaagggttggctagacagtgttttaaatgtattttgtgctgtcacttcccatttccatctcatgctttctgcttttgaaagacctcttaaaattcagatttgctctggcataggaaggttgtcattggaagagggacctgaatttaggttacgattatggggttgtcataactaattgagatcagggcttccatgtggatatccacacttgagatttgtgctgttttgcagggcagttttggctaaattggagtgattctttcatgtaggagaaataggcgaccttgagaagaggggaaaagattaggaatatggttactggtgagtgtcccaggctgttttgttaattcattttgtggctcttacagctaatctttacagtactggtggtgccaatttgaccatagcctatcctcccctgtcttaggtgggcacttagaattgtgggcctgggcccaggtctgtgaccagagccaaaccctgtgttgccagaaacttcaaatcagcttctgtagaagagctgtatctggctggtcagagaatctgaggcttgacttgggaagaacattgagtctgacctccctttcccctgccaagttttgtagatggacaagctaatttcatttattcattcaacatgttctttggaaactctttccaagtaccattttagacacagataatacatcggtgaacaaaacagacaagtttttgcagtatggagcttaacattcgttctgttgggaagacagtacccataggtaatgtacaagaaagtgctcggtgctgggtgcggtgagagggtaggatgggaagagtagagcagggtaggggagatctgaagcttgggtggtggggaggggtggggatgtacttttaaatggaagatatcagagtgggtctcccagagacggtgacctttgagcgaatgttagaaggagtcgagggagtgagtcccaaggatttctggggaaagagcatctcagacagaagtaatggccactgtgaaggtcctgaaagttggccagagtgagcaaggagtgtataggaagagatagataactaggagccaagtaggcctcgtaagcctctagagattttggcttgtgtttttggatgagatggaaagccatggggatgttttcagctgtgtgatatctgctcttttgaaaggatcactttgcatcttgaaataacgggataagatgggaggctgttgcaataatccaggtgagagatgacgatggcttgaaacaatgtaacagagaagtgattattggattttgggtatttttttgaagtcagagccagcaggatttccggccggatcatatgggaggtgtgagagaaaggaattaatcatcacttcaaggtgtcagcctaagtgatgggaagaatagagctgccattaaataagatggggaagacattgggggaatagggttggcaggacaaagttaggttttagttatctgaaagtttggcatgcctatttagaatccaactacagatgtagagtaggcagttggatgagtctggagttcaagggaggggtccagcctagagatacaaatttagagatttgccacagtactggagtgggtatagacaagaggaggtcagaggactgagctccaggtggtgcaacattgaggatgggaagaaagaaaggagccagagagaggggaaaagacatcaagaggaggagggagccagccgtggcatcatctgctagttgattgagaggacttgatcattggatttagtaaatgggaaagcatcagtactcatgaacaattttggtggagtaatggggaaacctgtaactagagtggatttgagaggggaagaggagaggaattggagacagtggaagaatagaccagtagttgtcaaagtattttgtctgaaagcctctttacatttttgaatttacggactccaaagagcttttgttttgggttatatctgtggatgtttgtactattaaaaattaaaataggctgggcgtggtagctcatgccttgtaatcccagcactttgggaagccaagtaggggcagattgtttgagctcacgagtttgagaccagcctgggcaacatggtgaaacctggtctctactaaaaatacaaaaattagccaggtgtggtggcacatgccataggcccagtacttgggagactgaggcaggagaattgcttgaaccagggaggcagaggttgcagtgagccaggatcacaccactgcactccagcctgggcgccagagagggactctgtctcaaaaaaacaaaaaaactctagttgcataagtaaacacacttgacccctataccaccaagatgaaaaaacacctcaatgttttaggattgtagatttcagagtcgcatttaagtcaggactaactagtttcagtttttttgcaaaaataaaaggaaatgcattttgggttggaaacctgggattcccctgaaagaagtggtgtctagtaacaatgcagggatggagtctcatatctgcgttttcctgactgtgtggccttaggcaaattattccacttatcagggccgcagttttattatctataaaatggagttgatcctatatatcttattgaggttgttgggggaatcacaagaggttgtgaaagtgccctatgtaaacagtctgaattaattgtaatacagtagcattgtttagatccatactttggcctaggtagaagtattggcttccatttccctctgaagacagtggtctttggtagcctcacttttgtggattgccaaatagcttttcttttgaaacaaagctgtagtcaaggcccacgctgtccaatcacttgttccagaaaagtatatctatttttaaagaccattcagtgatgggtctgatctctttcttatttgtcgcttttgaaagatgtttaataattcctaatggctcctaccagctagccacagccttttatcccatgcaggaagccagccaaactgatgttccaggtgcctccgcccacgtgttaccagggagagtgttgtgggatgagggaatctgcattcatggccaagtctgctgtctgatatacaaacctccgttactagggccttttgaagccaaagccctcgaatgacgtctttttggagtgggcagctaaggcctgctgaaggaaatcagatgttggtgtgacctgaggggtcacagaaagtatttctagttctatatgagatcttggtagctgcctaacatcagagaaggaaatcaggcccaatttctgttgaagtaatagttgatgcatttatccctggcctggggtccaaagatgtggctctcagctaacgtactgggtgacctgcgttggccccttgacctgcgcttcagattttacttctattttgcaagatctaaccctagtacaaccctaatcaaagacaggaattcacaagccctttcagcttatctgacaggcaagagtatattgcctgttgaagccatagaagcccaattcaatgaccaattttttgctttgggctggaattacacgcaactgtgttgttacgcacgctatagctaccaagttaatcagcagtgatactaaaaaatggaaaagaaatgcgtaattaacatggtttgtttgaaacagcaaagtattcaaagcagtctctgtagggtaaattttaaaatcgttttaggtgagaagttgggaccgccagtactaaataggtccactctatgacttcctggcccagctctcaggatggccaggaactagctcctgccttacaggactgccctcccttgcctgtacctggtgcctggctgaggagtgtggcagcctgaggggttaggctgtgaagaagggcagcagcgccaaagatgaccaaaacggcagtgattcatggtcgtccctgggctgagtgctttatgactgataattcatttacttactttcaagtaaattcctgaaggtcacagagctaagaagaggtaaagcctagccttgaacccaggagtcagtccatggctttaaccagtttggtttattgcctcattgaatcatctttaaatttaaaatgttttcctaattgaattcaacaaataactgagcatcaaagtagatagaatttcctgcccacaaagcccagagcattatgagatgcgcagtatggaacacttagtagggcttcaagaggagctagttcctctcctactctgcaaaggtccagaatatggtgataagcagccaggtagcccaaaggaaagtagaagcaaggaaggttcttccttcatgggaaggtgtaactgccaaggggtcgaagtcagtggtttggttttgcaccccagaagctgatccctacttagtctttggtggagccttgaatttcccaaagggaggatgggaaaagggaaacgctaagctgtaccccgaagtgggtaagaatggaggtgttattaagagcagagagatcatggggtcgaggtggtatctcttgatgatgatcaattctttaatccaggcagatccagaacccctgaggttctttgagtccctgcccatatagtaggggtcacagctttgccacaacccatctcactagcactaaacagcttcacaagaggtgggggttatgagtgaagagtcagagtgtttggttctcttttctcgcaggaaattgaagctcagtcttcaactgtgaagaccctagtggcgctagatacctgtatacaaagagacatgtcccttggggcctcatctctctgctggtgttttctgaggagttttcctccccaggtggggaaggctggtattttattttttttgtaagtccccacaagctccccagtgacctgctgttgccatctcttgattgtttctgccgcatcaacagcaggaagctgagctgtcagttatgtaatggggccgatggccccccagggatcatctgtcccttgcagctctgcaggacttgaaagcatccatgaggggacaggcctggcccggggctgttgacgtcaaggcccagttgctgctcacatgttcctcctccatggcctccttggtgccacctaacctagatagcatccctttgggcaaatcagagtggctcttgtaatcgtccagctgtgagcaaagctgcctgatggttcaggggtgcttccaactcccatttcctcttaccccagggacgcagacactcccaccaacagctactggttatcaaaacctgctctgagggaccccttgacttgtgcagggcagagaccctgcctttttattccgagccctgaattaagcactttacatgtatcattatcatacatcatctgcttagctattctgttatgtgccctcttttctgcagataaggaagcagaaaatcactttcctaaggttttgagagccaggatttgagacgagatgtatctgtctggaaactctactgctccgttctgcattctacagcctcttaaagccacttttaatgaatttctattctgaggcagatggtgggttcccctccagtagtaccatacagtaaagcagccagggctgccatgggtgtccttcacagtctgacactggtttcagcacaggcacactgtggcagggccaccagccatcccttcaggcgaggtcagcctgcatgtggattcctcctgtgttacaatgactgccccaaacattggcagaggaggcaaggctgggatagtgtgaggtgcccatataaccgaggtctggcagcagagaaggcaggagccacatatgcagccaggtcaaaattgccaaaagtttggaaagtaggagatctaaagcacacctccacccaccggcagctgggaaagcacccagcactgagggaatgctgtcattaggccagcgtctggcaccagctgcaaggaaagggctccaataagagccaaaggcatcatacgtgtctgtggtcctggtgccctggcagaagcccattctgagtgaacccagggattttaaagttgatgaggacccagcagaatggcagcggttgctctgtttctttctgacaaatcttccagctcactcactgaatcctgacttaagcaagggattccgtcactcatgcttactccaattgatgtggctgcccatagccctgtgtcgaaagattctggagccaagtcagattctggcatatggtaggcacttgcccagtggaggcattgattgtttagaccccaatatggtctcctaggaacttagtttaataatgcagatgagatatggacacttggtggtaatgggttatagatggctcagtagagatacaggaggacaggaaagagtggaggaggtggtattccaggctggttcttgaaggtaggttttaggggtaccttgtaagccaggtgggatgcgcaggagccacatctcagggtacatactcaggtttggtttcattacagtattctcagctacaggaggaaagggtactactgttcaggtagtgaaattcccaactggagatacactgtggacccaggacctagggagagtgcccaaggctctgtcttgattagggcagccgcattcgtgctcccagcccctcttttcatttccactagtgagtccgctgtgatattacaaaatcagaggaaatggagatctcctccagcgtttctaggattcagaggcatggcaggccttaaaactgccaaccaagtttaaaataaatcaataccataaaacactgcaatgaatttcccaacttttaaagaaatttcactttcagttagaggtgccaggggaaagctataactcagtttgcatcgtacacaggtcagaactctatattttgtttctttattaaagaaagtgatgtctagggacatgggaggaatggattagggccacccaggcactccataggccatagtgaggaagatgaaaatgcttccatttttccaggctgcaaaaagcatcttgatgtggggcttggggaagtcgccttatgaatggtcacctttatttttttttcccctgaactcggaggcctggtagtgtagctgtaacaggaggcaggttggctttgttatatcgtgttgggttttagtattgattatctattttaatgggaaaatcacaaagatgatgtgaaccagttgactcattctgcatttacttccatctttgtggggaaagaaaacccttcaccatgtacagcacccctttgtttttttttttctactttttttggatgtgcttaagacaagccctctcagaaagctaggcatgcctagggcaaatctaaggcatggagttgggagtatagtgttgtcagatcttggcaggttgtatgggcattaccagcacagcccggccttgtaccagacagaaagagaactagaagtcacaagtaaagactctgttgttagtaaccagattgcatcttggatctgatgatgtttggaaggaacccttggtttgcatagaacagcagaaataagtgattataccacaccccagacaaacaggctaactttaacttttaaaaatattttggagtttaggccaagtgcctaaactgaaatccagatgacaccactgacatggtccagaggtcctcctcccttttctgacctgagcatcttaggggccagggtaccaacaggtatagcaggaaaagccttcagagagcacatagctccttcctgctgctctggagtcctgtaagcaggacaacagccgtcgtgataatgccagactcgctcctgctcttagaactgagttgggatcattgccatagagagatccagatgtgagtcttgagcctaattatatgaacctgggtgaagttttaaccatggttaaaagattgcttttattttatctgcagcaggaacagaggatgtcatgagtaagaagtgttggtgaagatatcttcaaccccttgtgtcctctctgctcctcctcacttgatcccaccccccaacacacagtgtcagtgagaaaccctagcaccagtggttctcaggatgtggttcccagaccagcagcatcacctgggaacttgttagaaacacgtatttctggctgcacctcaaacctactgagttggaaactggggagtggtattgtatcagctctccaggtgatggctgatgaacacaaaagcttcagaactgctctggcaaaagagggtaaatgtgcagtcagccaccctgccatcttttagacatgcagaccattgccctcaccttttacccttttaccttcaaaaagcttggacctaggtgtgagaatcgggagggcctgtaaggtcctggcttctataattccataagtaattgtataattacctagcactgtgacttggacaagtcactcctccagagaaccaaggtacctgaaggaccactgttttccctttcccccgttccttctgtcctggcgtgttcctagttccatggtggatgtggttctgggaccctgggacaactgactcccgctcaggctctcagtgcatttgtcttcaggatagggtgaagccctgtggcctcttactcctgtgggagtaggaggaaacaatttaacctctccgtgggcttccctggggaagtggacttctgagccataataatgatgaatgtctcaaggtgatctcaggggagtgctgtcagggcaaccacaggattcctgtgaagtctgaatggtagggaggtcacccctagaggaaggagaaattgagaagcaacagggcataggaaacagggaagccccccgaggtacaggtggaacttaggtctcttaagtggaatctgtggggggttttttttgaggtggagtctcgctctgttgccaggctggagtgcagtgacacaatctcggctcactggcttcacgcgattctcctgcctcagcctcccgagtagctgggattataagtgcatgccaccacgcccagctaattttcatatttttattagagacagggtttcaccatgttggccaggatggtctcaatctcctgacctcgtgatccacccgcctcggcctcccaaagtgctgggattacaggcttgagccactgcaccaggcctctaagtggaatcttaaacatgactttgaattgtgactagcaaacttcgtttttctgttccacagacatgtattgagcacccgctgtgagccaggtttgggccgtggagatgagaattcccatcctcagtccatgtaaaccctgggcatctctctgagcctccgagtctgccttcgtaaaggggggttgctaacacctggagggattgccgtggggattacatagaacgggaatgaaaagctggcagaggcctgccaggcacgcagcaggtaccacacaggcgttggttcctgctgccctttcatgccagttctcgggcacgctgatggcagagcgagaattagcatctcggaatgtgtgcaggctcatgtgtttccccctcccccaccaataaaaaggaaaacatgcatgcccaaggggacccgttaattttttgatcaactgtgtgttgggcactgtagtgggtgcctctattaataacacatgggtgaaaaaagcagacgtggtcctcacccttgaggcactgagtttgagagacgtgtcatacgagagtaccataggtacagtttcagttgtgtgtaaatgaagaaaatagcagaaaatgaggacctgcccaaggcggtcagagaaaggctctctgaggaggtggcattgaagccgagacctgaaggatgaggcctctgccaagcagaggaggagggagccggctggagtgcggtggtcaaggtgtgggaggccaggaggaggtcactggctgctctgtggccagtaaaactggagagaggcagttgtggaagcagggagcccaggtaggaggctgtagctgcccaggttaggggagatggtgaagtgggagtgaattcaaggtgcattttggaggttcaaaagggctctcagatggcctgaaatcggaaggtaggaaggagtggctcagagctgactccatcatgtgtggcttgagtgactgggtggtgggaacagagccatgtaagagtgaatgttgcagcaggagacggtttaggggagtagggagatacacaaatgagtcttggacgtgcggacatgagaccgtactctctctcctgcgtgggtgtttgtggtaagtggcgcccgtttatctgggtcttctgagaggactgttggatctcagttttgctgcgaacaaagagcaccttcacaggcacagaatggtcccttggactcggggctgcgttcatggctgagtcttgctgcgttttgttcttttcttggtaatcagcttctcattaggttatgatgtgttgctcttctgtccttatttgcatctgctctctgctataattgtgtttcaagaacatggcgttttgttgtttttgtactgttttgctttttagagctgaaaacctgtgcggggtcttgtcacatgggcagcctggtgatcctgtcacggggcagctctccagtgtgggcatctcgctctctctttatttatttatttttactagttatataacatcagagtcatgattgctggctgtaaaattgattttgagaactactttaatttgtaaattgggaaatactttctattttgggttagggaaaggcatacaggggagggagatgggggaagaaggtctgtagtccctggtttcagtaatcttcaggtttctaagtgcaagcacccggagctgaggggcggccctccaaccttatctggacggtcagccagtggggaaggggctttggagtcactcctttggccatcccgtcacaccgtggtttgaatgacaatagagggcgtgggtagaggttgtgtcatctgcctgctcaccagacccccttccctggaaccccctggggacctaggtctttatacaaattcagcaagtggttactgagaattagcagcttgccgatcatcttgcattcactatatactcatgcgtcacttaatgacggggatatattctgagaaatccactgtgaagcgattttgtctttgtgcacacatcatggagtgttcttacacagtcctggatggtatagcctcctatacacctaggttatatggtagatagagcctattgctcctagactgcaaacctgtacagcatgttgtggtactgaatactactataggcagttgtaacacaatggtgtttgtgtgtctaaacatgtaaacatagaaaaggtacagtgaaaatacggcataaaaggtaaaaaaaatggctgggcttgctggcttatgcctatattcccaacactttgggaggccaagacaggaagatcacttgagcccaggagtttgagaccagcctgggccacagagggagacccccatctctacaaaattatattaaagttttgtttttttttttaagattaaaaatggtatacctatatagggcacttactatgaatagagcttgcaggactagaagttgctctgggtgagtcagtgagtgagtaatgagtcagtgtgaaggcctaggacattactgtacactattgtagaatttctttctttaaaaataaattaaccttagcttactgtaacttttttgctttctaaacttaaaatttttaaaaaatttcttgattcattaacatttagcgtaaaacacaaacataagacagggtcgcgctctgtcacccaggctggagtgcagtggcacgatcttggattacttggcagcctcgaccttctgggctcaagctgtcctcctgcctcagcctcccaaagcgctgggcttacaagcctgagccaccgtgcctggcccttctttcttcatatccttattctgtatacttttttctattttaaaaaagtaatttttttactttttaaattttttttgcttaaaaacaaaaacccacacattagcctaggcctatgcaggctcagcgtcagtactccccactcttttttaaatgttgtgaaatcctcacctgcatcctaagtattgttgtccccccaactcccactccagagaaaggaagtgatttaccactggccacatggctagctcatgccagctcaaaggccagagctccagtgctcatgatctccatcgagctaccaaagagagttcatctgagcaaatccatatgcaccgcactgtctcagggccaccaggagctcagaaaagggagctggcttttgccaaagaagtaagtgatggcaaagtagaggacacatgacttaagatggaccttgaagaaagaagaacagattaggatatttgaagcaggggccatagcacgtccaaagacagaacactggaatttgtgaagagtgcctatccctgggtgggttcacacagaggctagagtagaaagctaaatagggctaagttgccaagagccttgaatgccagcctgaggagaatgaacttcatcctgccaaaaaagacaagggtgagtgggtggtggtgagcaaggctgtattttaggcaggtgagtcagtaacaatgaggggagaactgtcagtcccccaggaggggaagatgaattgccacactggcagtacctgtctccaaaaagtgtgagactgcacaggcaccttccagagcatgggaaggcggtaagggtaacatctgaataggaagatgagaaacctttgcttctatattggtgtcaagacatcaacagacttgctgttgaacctgttggactggtcaatctaggtttaaacggcagctctcctacttactagctgggcggctttgggcaagtgatctaccttctctgggcccccatttccttgtctggtcagtgcagtaagtgttgctcactgtaggctgtgtccggcgcagttcctagctcctgatgacagttgagtcagtggtggctctgtgtattgcccccatcctgctattttgtttgtttttgccaaatccttataggctaatcacacgttttcactttgcttctcactaacaatttgtgatagcattctttctcccaaagagatctccaaaccccttagcaattgcctccagtgagttccccttggcttagtgggctttaactggttgttgtaaccaaaagtccatgtggacctctctgtgggtgtgaccttcttggcatctttcttataaccacaaattgttctgtccccatatggaagagtgaccgttcccctttagctagtaatggcaccttagcatcttcctcctggcaagggcccctgaggacctcagcctttcccttgggctctttctttgctaatcacagcagccacaactgaacctgtctctggggaccaattgaggcagttggcagcttttattttctgccccacacttaataagttgaggaggggaattagggtatccacacagctaactgccaattacctgggctgtttctagagacaaatagttccccttagttggtgttgggtttcacccagtgtctgtgtactaattaaagtgcttagaggaactaccatcccagtgccctattgcctcttgacctcccaaggccagaaagacgaggtttaagtgagtctgggttctcagacgcagacaagatgactcagtgtgcagccctgcctgctggtcaccacggagacctccaaatctcagaatctgcagtcttgcctactgtttctctgtgtgcatttggcaaactttttaatactagcacttttggcagtatactccaagcaatcaaattgtttaaaacaatattaagcaagtcttcatgtctaggagctttcacagtaactgcttgctccactgccctgactttctggcacacttgagatacagctgacatctctttgcagcagcatgctgtctcggctttaagctttgttcagaccctttccctcagtaagtcataccctgctgacttactgggccttacatgggcctgccacttgttgctgcaagagtgtttgtgcctcttccttgtataagtggggcgtggattgagcttcagggacgcagcatagagcctgtctcctcctgataacattcgtccacttgaaaggggagtctcaggctgggcgtggtggtgcacacctgtaatcctagctattggggaggctgaagcaggagaatcgcttgaacccgggaggcagaggttgtagtgagctgagatggtgccactgcactccagcctgggcaacagagcgagactccgtctccaaaaaaaaaaaaaaaaagatggggcgggtctcgggttctgctagaaactttcaaggaggaggaggacctcactgttgccctgttagaaagggctctggtgcattgagctgaagtctgcctccctccaaacactctttggcctgatttccctcagccccagccacacaagttgtacgtctcacctgtgctgggggtgccctgtttagagcactcatgtgccactgtccagttagtttttgccttaataaataaggggcctatagagggcctcttctcagtattctttgtgccatgttcctttctcagaacctgaatggtgtgttattctaccatttaaaaaatgcctggggcctggcgcggtggctcaggcctgtaatcccagcactttgggaggccgaggctggcaaatcacctgaggtaaggagttcaagaccagccttgccaacatggtgaaaccccatctctactaaaaatacaaaaattagccgggcgtcatggcacacgcctgtaatcccagctactcgggaggctgaggcaggagaatcgcttgaacccgggaggtggaggttgcagtgagccgagattgtgtcattgcactccagcctgggcaacagagtgagactctgtgtcaaaaaagaaaagaaaaaaaaatgcctgggatatgcattaaacttcccagccctaaggggctttgcagaacctgtgcatccttggggttagaaggagtccaggttaagaacccctgtgctggccccaggtccttcatttggcaggggaagaaatgaagtctccagagggggagtagggagagagctagaggggcctggaaccaggtttcccacatttactcttagcaacaggcaagatccttcatcttcccgtgtttcacttcagttcctcttagtaggttgcctcctgggagcacattcctatgattgcatctgtgcttttatagcctgggcgacagtctgtctgcctttcagagaatccgtgggactggcttcctctggatacacttaagtgggtgaacagaatgtggaagatggtggcagggggtggctaggtaaagggtggacccctgctgagcaggggctggtggtgctcagttccttgtagggctgccccagccgcctctttcaacaatccatgtgttttgaatgtggcatatgggagtcctccagcagtccaacatatctggcaggacttcagccaggattccacttcctggaccacttgttagctaaagagacttataggatatatttgccattttacaaatggttgggtctagaaagaggctttgtgcattttaagatcttgggcagggcgttgtggctcacacctgtaatcccagcactttgggaggccaaggcaggaggatcacttgaccccaggagttcaagaccagcttggccaacatggcgaaaccctgtctctactaaaaatacaaaaattagccgggcgtggtggtgcgcgcctgtcttcccagctactcaggagaatcacttgaacccaggaggtggaggttgcagtgagccgagattgcactgctgcgctccagcttgggcgacagcaagactaataagactaattagctgggcacagtggcatgcacctgtggtccctactcaggaaactgaggcggaaggatcacttaagccagggaagtcaaggctgcagtgagccaggatcatgcctttgcactccagcctgacagagcaaggccctatctcagaaaaaaaagccatcttgggaagtccatactttcagactaaaccatagtgctccagtcataagtctactcttttcattaacctcttaccatacctaacttagactcaggggacacattctgaggccgggcctgctccaaatagccacacttggatttcaaggaacccctccacgtgaaacagatgtatttgccaaagttggccgtcttcttccccttgaaagaaggcctcctgttgagaagtcagtaaggggaatagtagcagagagagctgaaatcgagacaggagccccctggttgtgtaactgataggctatgtaatgtcaggaaaatctgtaatccctgcatgcctcatttctctcacccagctctgaaggtgtgagagaggggagcagcaccctgtagcatggtagaaaaatagcatgggcttccgacttggacacggtcccagctctgtcccttaccagctgctggagtttggagaagtggcccagctctctgagcatcactgtccacacctggcttgccgggattttcagtgggaacgtgtgcagagcacttggcagtgatgcaggaactcaaccaaaggcagagatttttttataatcatgtgtttatgttaaaaccctatcatgtggaatgaatgattctgtgaagttttattgctatgtactaattcccagtttctagctatcacctggtatttgagctcttcctaaaaacccagcactgctgcttggtcacctgagaggcttaagaaaagcagcagactctctctgtcctgcaggaagctcagggtctaagatggtaaggttggagcacacgacaaggctagtgggatctgaggtcgtccatgccttttcactgggcagggggacagaagagttcccatagagactgggccctctgggagtgtttcctggggaaggcgtgtggatgggaacccaaagggtgaatgcgatctgagtgacagatagggggtgggagttggggtagccagatcagcaggagctgaagacccaaagcaggagggaggctgtcacctcaagagaagatcaacttgaggccaaggcatcttttctggaatttttgccctggcaagtgactgcagtgaggttttatgggtttggttttgtgtttttttggatgtgatttgcagccactgttgtagcttattaaagtacctcctgtgcacctcactccacctgctatgtgtactatcactggtctttgtacccggcaaagtagacatttcctcattttaggctgagcaaactgaggctcgggggaccctgacttggtgaaggtcagctgggatgtaaattttggatcttcctactccaaagcccatgccttgagagaacaccacctccaagccacgctcctctgcatttggggcctgcccctggatatctgcctgtgggtgagctgccttggtttggtctcctggtcagggctcagatgtcgtaaggcgtggacctgtggtcttctgggttgtcatggagcactgcgaagctcctgttgtatatgttgtataatctctgccctcttgctcctctttttcctaacattttgcccgttctgtatacccgaagactgaaaacagtgttatcccatttgtcagtactcccattccttcgaccctgacaacaggcacgttcacagcacagtcatccctgtttttgccctactttaagcaccacagttgggagtgcagccttagaggaatgatgcatcaggaagcgtgactccctggccttggtgcctctgagtgattggaggagacattcgtgctggggccaccgaacccccagggctggcatgttgatgtctgaatgtgaaaagccagatgctttggtgtattaaacaagtgaagaatgactaaccccacttagaggaaggagaggactgccgtctgtgaccctgacagatgactttgcctctgtgcacttgtgaggcctgcttgctccacagcacgatatgctgaaaattaataacctgagcctcagtttgctcatctgtaaaatgaggataattcttacatggtcctttggacaaatgaggtgttgcatattcagtttgcacggcagctagcatgtcataggtatcattagctacagtgataatgccactacacaggactgcgggtgaatttaggtaggagtgaattcttggctagccacccaataataccccactttgagtttatactgtaccttagtctatgagtatgccaatgggatgactttcttttctattaactaaatctgagagtcaggatagaaagagaaaattgggctttgggtttgaagtcccagtctgtgataccctaagaaccaaaatgaccattaacatgaatgacagcaagatcgatcttactgaatgccccaccctgggtcaggtgccatgacaggcaatttacttgaagaattcttcactcttcacagcaggcccctgaagaggaaagagttccatgcccattttctagtttaggagaaggagatcatggaagtagctagtaaatggcagagcttgcatttgaaccaggactgtctgccatagagcctgtgttcttccctgagggagcactggagtgacgataaacctcgtggttaccagacttccacatttcctaagatggtgcaattttaaaaactggggaggcaggtccaggagggaagcaatttttaaaaccattcctacttactttcatcatcatttcatcaaagaaatgatgttttaggccaggcatggtagctcatgcctgtaataatcccagcactttgggagaccaaggcaggaggattgcatgagcgaagccaggagtttgagaccagcctgggccacataatgagaccccgtccctacaaaaataaaaattaaatctagccaggtgtagtggcatgtacctataatcccagctgctcaggaggctgaggcaggagggttgttgagcccaggaatttaatgctgcagtgagctatggttgtgccactgtactccagcttgggtgacagagtgagaccctgtgtcttagaaaagaaagcaaaaggtaatgacattttgacactaataaagtaggaaggccatccttttagagtaagggataatcaccaaggtattctgtgcctgcaggctgaggagtaggggaaggaggtgaacacgtgagccatccttgtctccagccccatcctgctgtgcatgttcccctcatatctcccaggcttctgttctccaagctgctaatggccttcatgaaagtagttcagtttctcagtcttcttaaacagaccagacacctgcctgactggcagagaagcttgctggaagaccgttcactgcctggttggcaccatgtccccttttgtcccccgagcactagacctgtgcacaggcacgtaagccttccatgagccttttttctgagtgagtctatttataaatgaagggattagatgggttttaaactccacttaagactcttcttgtcttctctaggaagggattttgcatcgttacatgtcaaaagcaggggatttggagtgagactgccctgagttaaacccttttctctaccacttactgtctatgaggctgttctctctgagcttcagttttctcatctctaagacgagggggacgataacccctacctcttagggttgctggggtgaaatgaggcaatggatgtaaaacactcgatcctttaacagtgattggaaagcagtgttgctttacgaggttgttgcctataacacagttagaacttgcacagacagactgctcaataagtgattgctgttacgccagttacagagaaataagaaggtggggtgcactgagagaacttggtccaagagctgaaatgagaaaggtaaggattcatagcacattttcccagatcactgacaccttccacccccaaggtcatctcaggtgcaagctactggaaccattgctgagccggctttggaagcactgattgaagactatcatagtgcagagactttgggtagtaaagctggaaaactttggattaagtgctggttctactgctcagcaactctggtgtggggcaagttgctccatttctctgggcctgttttcttgtgaaaactggccaaatccctcctcacagtaatcatggaagggcactacagatgtcagttgcaggtttatcacatcaccacttttcattatgcttagcaggtgtgatttttgccctcaaggagcgggctctggtcagaggtaggggttccacagagaggaatgagaagagccccggtagaagctggtagccaggcagtcaggcacagcctgagcagtcagggagctgagatgtggcatctgctaggatgaagcaccacaagcctaaggcctccccaagggcccactggggctgagacctacaccctttattgtgcccacaagtacctgggagggtctgtgcttaaactcagaaccatgtggtctgagccattcctgttcatagctacagaaagcgcctccactaccttcggtgagcttactgtgctgttagctccctgggaaaaatgctctttctgtgatggcagatgggaaaagaaccccaagccaagatcctctccccagtagagagccctcttattttccttctttgtgcccacaagagagaaccagactcagacctgtaggctgttctgaggcttccaacaggagggccagagccagtgccagagctagagggagcagggaggagcctttgggaaatgtcagcttcacttcctggcatgggacccagtgattacagcggtcattacaagctggtgtctcaggagttcttgcagagtgctgtgctgttggtctgaccttctgtagtcacactgtgttctgctagtttattatgtaaaaaggaacctctggtttctgaacctgcctccttgccaacactgcttttcagctgccacatgctaccttcctgctgatgggcatccttttcaggagattgtccgcagggagggaggaaaggaatgctggaaagtcataactggtcccaaagattattttagcacatcacatgtggctgtataatttctcatcgtatttcacaaggtcttaatgtctcagatggtgagggcctaccctaaataccctcttcccccatcttcaggttgatctgctgtgtctacggaaagcacggagagaaagcaataggcatgctaaatagagctagagtttgagatggctgctgaatcatcagggaatatgtttatgatgattttctttttccaagtcaaaaactgggatacaagacccacaagtggatttttttgaggggaattaacagaccaaggaacagaagcagcagagtgaaagactgggcccgagaaatcctgtattttctttccagatcagccacacccactttcttggtcacccgctccctgggcagtagagcagggagtcacatagtctaacctcccgtttggcagtgtggaagctctcctttgtccactgggcatggaagagtccagacaagaccccacatctggacctttctattggagctgccagcttttcttgttcattaaagtaccctatttttcctattaaaaactaaaatataacattggtgtgtgttcattattaaaaatcagaagtgagggaagaggaaaatccagtcacaacaagcacaacatgttggtgtatttattgtcagattttcctacactgaggggtttgtgtttttacatagttatggtcatgctgtgcgctacacaactttgtaacctacccttttccacctaccccagggaagtgcttttgtcataatcttcaaaatgtcatgcaatgatctcatttcctctgtagtatatcagtgcgttgaaggatcatttgcttacttaatccttatttttggacttgtgagttgttatatttcagtgaacttctttatccataaagttcttttcatatttaggtttatctgttaagcttggctttcaggagtagaatttcagggagctaccaatctaaacacctttgaagccctaaaaacagtgccagactaccttccagaagccttatcccctcctccagcagtgtgcggggcaccctcaccagccagaaacactttcagtggttgcgtggctgagaaccatggcctgttcagatttaacacgtttatagtctctggttggggacagttggccaggaaggggtagagtcattgagtatgtttgtccctgctgtgggccaggaacctgagtcattccacccagacctcaaccaagagtccccagtgctcagagggagaaactgaggccaacagacagtaaattatccaatattgtcctatcctgctgcctcttgggaggactggccaggtcccttcccaggagctgaggacaacgagctggtgttgtcagcccgcacaggtggcaagtcatggcagccacggtgctggctctgcctgacaaagaaaggcacgcacagtgaaagacttgtctgctttggtcattcgggcactttaaaaactcctagatgggccaaggtaggtggatcacttgagcccaggagttcaagaccagcctggacaacatgacaaaacgtcgtctctactaaaaatataaaaattagcctggcgtggtggcatgtgccctgtagtcacagctactcaggaggctgaggtgggaggatcactagagcacaggagttcaaggttgcagtgagctgtgatcaaggcactgtactccagcctgggtgacagagcaagaccctgtctcaaaaaacctcctagatgattccatgtgcaacgaggctggagcactgttgccctagatggcccgccctgcccaggacagcgctatacttagcactgatccgatagctcagagtgggcgctgcccaagactaatctctgtgggcccttgtattctaggcctccagtagaataagccactgaagggcaggcttcttgtcttattcctgaggcctggcactaaggcagtttccaaataatagccaacactaataggatcaggcactcttcttggttttacgttcatttaatcttcataatagcctgtgacgcaggtacaggtgatgagaccagggaacagaggacttaaattcccccacagtcgaggggcagctcctgtttactcagttgcccgttctggctccagagccctcgttcttaacccccacagtgcactgcagcagacagtgcaggcccagtccagccctgcccctgggtgtgggattctggcccatgttaagacctgagcaggtagcctggttcggattctcagaggcctgagcttcactcttctcttctgtaaaacaggattactgaacctagagagggttgctgtggcgtttctaacaaacagcacaattaatcacagagagtggggaagaaagcatgagtggaagcagtgctggcaaggtctgtggggacagactatccagggtgggccctgcggtgtcttgctcctaatagtacggggaagccagggttcaagattggtttgacagctagagccagcaagcttgggttcccagctagtgtctgccccttagtcagtgtgcccttgggtaagttacttaacctgagcctcagtttccctatctgaaaaataagcatgtgtgaataagaccagggaggttgtgaagctagatttaccccatctctttagagctctgccccacagcccccagcacacacagcttcagtgttcctctgggttgagggctggtgcccaggcctgctgaccaatgtcccctccttacccgccttctgtcttccaggtcgattcctcgggacccacagtctcaccacgtctcctccagaggacggcagagggtacaggtggtggcctggccggttggcgatctcccgacagctggatccggcaatgtgaagcttttgtttgggtttccccgcttctttttagttttgctttatttttttccttttcttttcttttttttttttcctctttcctttttttaaatttaaaccattgagacttcagaagagcaggacacaatgctgtggacaggcaccaatttctttaaagaaattcaatgtgggcaaggcatatgtgtaaatttcacttttactttttataaggggttagggagctatttttggttttgtccttcactttccctctgtcttccttctttatacttttctcagttctacttatgacacctcacttccctagagaaggcctgcctccccatagggaatctgggggtttcttctggaacggggcgtgaggacacaaggaggcctctgggccacgcctccctaccagatgcaggaactcctggactccttggtgggctggccctggctagcccttgggcctcggagatgatcagaggtgaagaaccgcctggaagaggaaggccagggtttggccaggagaactaagaaggtctcaactccaggctttgttgtgtttaagctattgagagccccaggccacaccaggacttgcagtggtgggaatccattcctcttctgccctgtgttgcagggaactaggaggtaagggtggagggcgaccatctcgctcttgctggcggtggagcagccatccctgcctttctgttgggaaaaactgttgtgccaaactcttgtgtggaacacagctgggtcttcagcaggcatctgtcactgccgtgaggtcagcgcttctcacctaactgcctcctggattgtcatcttcccagatgtgtcccatagtgtccaggtgtcacagagacggcctgaggccctaagatctggttgtgactttgccatgataacagggtgtcctgaactggctgccgttgtcgtgttctcacagtgaagggcgtgccctgtgtgccggggtccatggtgtcatatgcagtgacacacactgtcaagcgccatttccctcacccctggagacttactgttaggtgcctgccctcagtatagacgtatccaatgggaaaacagcggacctgcccagagcagggaggtgtcgtggaactgggtagaccccctgcagcgttaggggcccatttgtgggctcgccaccttcaggcttccccagccatgacacttcagccccgccacccatgcctgtctgctgcagccatccttgcactctccagcgacactctcgcacctccctaggggaagcttccctccccctgggctgctgctctgagcccatctgttctccccctgcaagaaggggcaatgctcttgtgttgtccctctgtctggacgcgcctggccactccgaaggcttttcaccccattatggccaaatagtatagggccactggggagggggaagggaatcattttgtgttcatttttgttttctgtttcacctaaaccagcataggattgataggggagacggttggcgggcatttccgtttctatgtgaccaaggcagcaggggcttttacctgctaagcggcaatcctttggccctgagaatttgggagagaacagtgcatcaggccaggctcagcaatatgtttgctcacattctttcagccttctgtcacccccctcaacaccaaactttcttccttgtgagcagaaggttggctgctgttagcaggatcccacagtgataaccaggcccttcccttcctaagccaaaacccattgtgactgcctgtctctcctgtctctgacttctcaggcagcctcctgagtgcactgagttgtatccgagagggtgggaacagcagcatcccctaattgcagtacacggttccttttccgcccgccaccctgcctttccttgggggcagctgtctctctgtacatgagcaaatgggcaaaaacagtccccaaacccagcacccccctctccctggctgcagcccacactgtaacatccctagtgaggctccagcctaatgagccccttattttcttttttttccctccccaggtctagtagctctaactaaaaagttcttggagccatcgtgctccccctttgttatttttcttgctatcagagtagcaagaaacagcacccctgtaggtgacaggtgggcagcctggtaggggtcgccagcctccatgccccctcatcttccagttcttgcttagtggcacgacctctttccatagcataaatgcaggccagcgttttagccccaagtgcctgcccttgcttcttacccctcccctgctttctcaaacacttgcccacctcaggcactcagcgggctccgccgtggtgagagaactggccgtggctcagccccgggtagcacctgtagtttcagtgccactctccactgtccccttgtggaccagcttccactcactgtcacgtcccccctcctgcgtcttcactgggtctcaggctgccagcagctctctggtgcatcgtctcaacaccaccaagtttgtaggacctgcccaagttctagtagtattcaaaacttcaaacggcagtcatttgttctcctcggctctgtggcaaggatagccctttggagggggactcttgacctcggctgttagggatctgaacttggttttcccgtcagaagaatcagcaggacagatcgtagtgccttattccattgtcctcccctggccaggcctcctggctcagctggaagtgcatggcttctttctccctatctgtgtcctctgtcacttgctctttcactctctctctcattcccagagagccacgggggagggatcaccctcacccccaacaccctcttcctgagggctgtagccaggtccgcatctccccaccaccaccagggcactcactcgcagctatagcccaggacagaaaaactgtgctttggacaggtgcacactctctgcctcttacctctagccaggaggatgcctcagtctgttcattcgagactggccccgtctgaaccttctctgggcactggggactaaggttgcaggccttagcctcgtctcgtcccagaggcattggatcaggagaatgggaatttttttcctcccacctggacatagtttgcccctgtggctgcctttctgagggagtatactaaatgtttacttaagaaacaccctgtttacagccagaggagaaacacccaacactgagtggagatttgactctggacagggcctggcctccttagtggcactgccggggggccccagagcgaatgagggcagagatgcccggggcaggggcaaacgccctccgctccctctgctcccaaccctgtggtgctaggaccactccccgccttccctacggcctcctcgccctgcacattccccacctccacattcccctcctccaagatctcagctccttaacatatcagttgtctcctagcctagaaaaccagtgtttggagcaataagatgattatttttgcttgaatctttttctaagagaaggaaaagagctggcattgtgggaattttctttttatgctgttagctgtttaccttcttagaagacatcctaataggatggatgtctgggttttagccttggggtatcttttggaaacttagaaaagcaggagtcaggctgccaccccctaaggagggaccctaacgttctgcccttgcctggttccatatggctccttccagccctgcccaccaagtgcagctcccactttccatcctgcccatacgcccctcttcccccgacatctgggggcgctggtggcacttactctaggttggtctcagactatccctccccttggctggttttccctcctaggcctgtctggcagcccccagacagacgtagctcctgggagtctcggccctggcaaccttggaagagccaagctgacattgtttagctcttcaggccactgggttttggaggcagaagtccagagatactggctctgccaagctgtcgtactgggctgtggcacagccttcgagacaacacgggtgtatctctgatcctgccctacctaggcttcaaggggcttctgtctggagaaatgccctcaaagggtaaccagtaggtgtggcattgaattggccagtgttagcatctacagccatcaccgagatgagtccactgccgttgcctgcccgagggccccctaaggttatagacggtatcagcagggaggccgtcccgctggttttctaggagagcccac

(The sequence listing continues in the following parts.)